(19) United States
(12) Patent Application Publication
(10) Pub. No.: US 2009/0263859 A1
(43) Pub. Date: Oct. 22, 2009

(54) Thermophilic and thermoacidophilic glycosylation genes and enzymes from Alicyclobacillus acidocaldarius and related organisms, methods

(75) Inventors: David N. Thompson, Idaho Falls, ID (US); William A. Apel, Jackson, WY (US); Vicki S. Thompson, Idaho Falls, ID (US); David W. Reed, Idaho Falls, ID (US); Jeffrey A. Lacey, Idaho Falls, ID (US)

Correspondence Address: TraskBritt / Battelle Energy Alliance, LLC, PO Box 2550, Salt Lake City, UT, 84110, US

(73) Assignee: Battelle Energy Alliance, LLC, Idaho Falls, ID (US)

(21) Appl. No.: 12/380,450

(22) Filed: Feb. 26, 2009

Related U.S. Application Data
(60) Provisional application No. 61/031,984, filed on Feb. 27, 2008.

(51) Int. Cl. C12P 21/00; C12N 15/11; C12N 15/00; C12N 9/10

(52) U.S. Cl. 435/68.1; 536/23.2; 435/320.1; 435/193

(57) ABSTRACT

Isolated and/or purified polypeptides and nucleic acid sequences encoding polypeptides from Alicyclobacillus acidocaldarius are provided. Further provided are methods for glycosylating and/or post-translationally of modifying proteins using isolated and/or purified polypeptides and nucleic acid sequences from Alicyclobacillus acidocaldarius.

### RELATED APPLICATIONS

[0001] This application claims the benefit of the filing date of U.S. Provisional Patent Application Ser. No. 61/031,984, filed Feb. 27, 2008, for “THERMOPHILIC AND THERMOACIDOPHILIC GLYCOSYLATION GENES AND ENZYMES FROM ALICYCLOBACILLUS ACIDOCALDARIUS AND RELATED ORGANISMS, METHODS.”

### GOVERNMENT RIGHTS

[0002] The United States Government has certain rights in this invention pursuant to Contract No. DE-AC07-99ID13727 and Contract No. DE-AC07-05ID14517 between the United States Department of Energy and Battelle Energy Alliance, LLC.

### STATEMENT ACCORDING TO 37 C.F.R. § 1.52(e)(5)

### Sequence Listing Submitted on Compact Disc

[0003] Pursuant to 37 C.F.R. § 1.52(e)(1)(ii), a compact disc containing an electronic version of the Sequence Listing has been submitted concomitant with this application, the contents of which are hereby incorporated by reference. A second compact disc is submitted and is an identical copy of the first compact disc. The discs are labeled “copy 1” and “copy 2,” respectively, and each disc contains one file entitled “Utility BA-312 Sequence List II.txt” which is 917 KB and created on Feb. 26, 2009.

### TECHNICAL FIELD

[0004] The present invention relates generally to biotechnology. More specifically, the present invention relates to isolated and/or purified polypeptides and nucleic acid sequences encoding polypeptides from Alicyclobacillus acidocaldarius and methods for their use.

### BACKGROUND

[0005] It has been believed until only very recently that bacteria in general do not glycosylate their proteins. While there have been some instances reported, these were dismissed as unusual anomalies (Borman 2006). It is now becoming more accepted that bacteria do glycosylate their proteins in perhaps more ways than eukaryotes do, although this belief is not yet widespread (Schäffer et al. 2001). In a recent review article, it was stated that glycosylation has been shown to assist in protein stability, modulate physical properties such as solubility, protect against proteolysis, modify activity profiles, and target for externalization (Upreti et al. 2003). In 1994, a group purified an amylase from Alicyclobacillus acidocaldarius and showed that the amylase was cell-bound, non-glycosylated and insoluble during active growth (Schwerman et al. 1994). As the culture entered stationary phase, the cells released several soluble glycosylated versions of the amylase into the medium (Schwerman et al. 1994). No attempt was made to compare the activities of the various forms of the amylases.

### BRIEF SUMMARY OF THE INVENTION

[0006] Embodiments of the invention relate to purified and/or isolated nucleotide sequences of the genome of Alicyclobacillus acidocaldarius, or a homologue or fragment thereof. In one embodiment of the invention, the nucleotide sequence is selected from at least one of SEQ ID Nos. 2, 19, 36, 53, 70, 87, 104, 121, 138, 155, 172, 189, 206, 223, 240, 257, 274, 291, and 310 or a homologue or fragment thereof. In another embodiment of the invention, the homologue is selected from the group consisting of a nucleotide sequence having at least 80% sequence identity to at least one of SEQ ID Nos. 2, 19, 36, 53, 70, 87, 104, 121, 138, 155, 172, 189, 206, 223, 240, 257, 274, 291, and 310.

[0007] Embodiments of the invention may further relate to an isolated and/or purified nucleic acid sequence comprising a nucleic acid sequence encoding a polypeptide selected from the group consisting of a polypeptide having at least 90% sequence identity to at least one of SEQ ID Nos. 1, 18, 35, 52, 69, 86, 103, 120, 137, 154, 171, 188, 205, 222, 239, 256, 273, 290, and 309.

[0008] Embodiments of the invention also relate to isolated and/or purified polypeptides coded for by a nucleotide sequence comprising a nucleotide sequence of the genome of Alicyclobacillus acidocaldarius, or a homologue or fragment thereof. In one embodiment, the nucleotide sequence comprises a nucleotide sequence selected from the group consisting of a nucleotide sequence having at least 80% sequence identity to at least one of SEQ ID Nos. 2, 19, 36, 53, 70, 87, 104, 121, 138, 155, 172, 189, 206, 223, 240, 257, 274, 291, and 310.

[0009] In another embodiment of the invention, the nucleotide sequence comprises a nucleotide sequence selected from at least one of SEQ ID Nos. 2, 19, 36, 53, 70, 87, 104, 121, 138, 155, 172, 189, 206, 223, 240, 257, 274, 291, and 310 or a homologue or fragment thereof. In still another embodiment, the polypeptide comprises an amino acid sequence of SEQ ID Nos. 1, 18, 35, 52, 69, 86, 103, 120, 137, 154, 171, 188, 205, 222, 239, 256, 273, 290, and 309. In yet another embodiment, the polypeptide comprises an amino acid sequence selected from the group consisting of a polypeptide having at least 90% sequence identity to at least one of SEQ ID Nos. 1, 18, 35, 52, 69, 86, 103, 120, 137, 154, 171, 188, 205, 222, 239, 256, 273, 290, and 309.

[0010] In embodiments of the invention, the polypeptides may be acidophilic and/or thermophilic. In further embodiments, the polypeptides may be glycosylated, pegylated, and/or otherwise post-translationally modified.

[0011] Embodiments of methods include glycosylating or post-translationally modifying a first polypeptide using a second polypeptide selected from the group consisting of a polypeptide having at least 90% sequence identity to SEQ ID Nos. 1, 18, 35, 52, 69, 86, 103, 120, 137, 154, 171, 188, 205, 222, 239, 256, 273, 290, and 309.

[0012] Further embodiments of methods include methods of modulating protein stability, solubility, degradation, activity profile, and/or externalization of a first polypeptide, the methods comprising glycosylating or post-translationally modifying the first polypeptide via a second polypeptide selected from the group consisting of a polypeptide having at least 90% sequence identity to SEQ ID Nos. 1, 18, 35, 52, 69, 86, 103, 120, 137, 154, 171, 188, 205, 222, 239, 256, 273, 290, and 309.

[0013] Further embodiments of methods include placing a cell producing or encoding a recombinant, purified, and/or isolated nucleotide sequence comprising a nucleotide sequence selected from the group consisting of a nucleotide sequences having at least 90% sequence identity to at least one of the sequences of SEQ ID NOs: 2, 19, 36, 53, 70, 87, 104, 121, 138, 155, 172, 189, 206, 223, 240, 257, 274, 291, and 310 and/or a recombinant, purified, and/or isolated polypeptide selected from the group consisting of a polypeptide having at least 90% sequence identity to at least one of the sequences of SEQ ID Nos. 1, 18, 35, 52, 69, 86, 103, 120, 137, 154, 171, 188, 205, 222, 239, 256, 273, 290, and 309 in a environment comprising temperatures at or above about 25, 30, 35, 40, 45, 50, 55, 60, 65, 70, 75, 80, 85, 90, and/or 95 degrees Celsius and/or a pH at, below, and/or above 8, 7, 6, 5, 4, 3, 2, 1, and/or 0.

[0014] These and other aspects of the invention will become apparent to the skilled artisan in view of the teachings contained herein.

### BRIEF DESCRIPTION OF THE SEVERAL VIEWS OF THE DRAWINGS

[0015] FIG. 1 depicts a sequence alignment between SEQ ID NO: 1 (RAAC00164) and ref|YP_{—}001223775.1|, ref|YP_{—}729290.1|, ref|ZP_{—}01084440.1|, ref|ZP_{—}01079150.1|, and ref|ZP_{—}01471594.1| (SEQ ID Nos: 3-7) respectively, which all have the function assigned to SEQ ID NO: 1 in Table 1. Amino acids conserved among all sequences are indicted by a “*” and generally conserved amino acids are indicated by a “:”.

[0016] FIG. 2 depicts a sequence alignment between SEQ ID NO: 18 (RAAC00517) and ref|ZP_{—}00589533.1|, ref|ZP_{—}01386435.1|, ref|YP_{—}378533.1|, ref|ZP_{—}00513158.1|, and ref|YP_{—}374173.1| (SEQ ID Nos: 20-24) respectively, which all have the function assigned to SEQ ID NO: 18 in Table 1. Amino acids conserved among all sequences are indicted by a “*” and generally conserved amino acids are indicated by a“:”.

[0017] FIG. 3 depict a sequence alignment between SEQ ID NO: 35 (RAAC00650) and ref|YP_{—}001127183.1|, ref|ZP_{—}02038504.1|, ref|YP_{—}001647987.1|, ref|YP_{—}001377114.1|, and ref|NP_{—}835081.1| (SEQ ID Nos: 37-41) respectively, which all have the function assigned to SEQ ID NO: 35 in Table 1. Amino acids conserved among all sequences are indicted by a “*” and generally conserved amino acids are indicated by a“:”.

[0018] FIG. 4 depicts a sequence alignment between SEQ ID NO: 52 (RAAC00991) and ref|ZP_{—}02327412.1|, ref|YP_{—}001487207.1|, ref|ZP_{—}01172765.1|, ref|NP_{—}831314.1|, and ref|NP_{—}844008.11| (SEQ ID Nos: 54-58) respectively, which all have the function assigned to SEQ ID NO: 52 in Table 1. Amino acids conserved among all sequences are indicted by a “*” and generally conserved amino acids are indicated by a “:”.

[0019] FIGS. 5A and 5B depict a sequence alignment between SEQ ID NO: 69 (RAAC01110) and ref|YP_{—}001519856.1|, ref|YP_{—}711688.1|, ref|ZP_{—}01331931.1|, ref|YP_{—}001076955.1|, and ref|YP_{—}336440.1| (SEQ ID Nos: 71-75) respectively, which all have the function assigned to SEQ ID NO: 69 in Table 1. Amino acids conserved among all sequences are indicted by a “*” and generally conserved amino acids are indicated by a “:”.

[0020] FIGS. 6A and 6B depict a sequence alignment between SEQ ID NO: 86 (RAAC01166) and gb|AAR99615.1|, gb|ABM68334.21, ref|ZP_{—}01372248.1|, ref|YP_{—}519555.1|, and ref|ZP_{—}02234077.1 | (SEQ ID Nos: 88-92) respectively, which all have the function assigned to SEQ ID NO: 86 in Table 1. Amino acids conserved among all sequences are indicted by a “*” and generally conserved amino acids are indicated by a “:”.

[0021] FIG. 7 depicts a sequence alignment between SEQ ID NO: 103 (RAAC01167) and ref|ZP_{—}01515212.1|, ref|YP_{—}001277643.1|, ref|ZP_{—}02291400.1|, ref|YP_{—}001633727.1|, and ref|YP_{—}001434357.11| (SEQ ID Nos: 105-109) respectively, which all have the function assigned to SEQ ID NO: 103 in Table 1. Amino acids conserved among all sequences are indicted by a “*” and generally conserved amino acids are indicated by a “:”.

[0022] FIGS. 8A and 8B depict a sequence alignment between SEQ ID NO: 120 (RAAC01170) and ref|YP_{—}001324592.1|, ref|YP_{—}342776.1|, ref|NP_{—}780975.1|, ref|YP_{—}001636830.1|, and ref|YP_{—}001299026.1| (SEQ ID Nos: 122-126) respectively, which all have the function assigned to SEQ ID NO: 120 in Table 1. Amino acids conserved among all sequences are indicted by a “*” and generally conserved amino acids are indicated by a“:”

[0023] FIG. 9 depicts a sequence alignment between SEQ ID NO: 137 (RAAC01248) and ref|ZP_{—}02170160.1|, ref|ZP_{—}01171895.1|, ref|YP_{—}076646.1|, ref|YP_{—}590910.1|, and ref|ZP_{—}02175410.11| (SEQ ID Nos: 139-143) respectively, which all have the function assigned to SEQ ID NO: 137 in Table 1. Amino acids conserved among all sequences are indicted by a “*” and generally conserved amino acids are indicated by a“:”.

[0024] FIGS. 10A and 10B depict a sequence alignment between SEQ ID NO: 154 (RAAC01348) and ref|ZP_{—}01665289.1|, ref|ZP_{—}01643350.1|, gb|AAW77167.1|, ref|YP_{—}452722.1|, and ref|ZP_{—}02241787.11| (SEQ ID Nos: 156-160) respectively, which all have the function assigned to SEQ ID NO: 154 in Table 1. Amino acids conserved among all sequences are indicted by a “*” and generally conserved amino acids are indicated by a “:”.

[0025] FIG. 11 depicts a sequence alignment between SEQ ID NO: 171 (RAAC01377) and ref|YP_{—}147952.1|, ref|YP_{—}520670.1|, ref|YP_{—}001395809.1|, ref|YP_{—}001309701.1|, and ref|YP_{—}001643660.11| (SEQ ID Nos: 173-177) respectively, which all have the function assigned to SEQ ID NO: 171 in Table 1. Amino acids conserved among all sequences are indicted by a “*” and generally conserved amino acids are indicated by a“:”.

[0026] FIG. 12 depicts a sequence alignment between SEQ ID NO: 188 (RAAC01611) and ref|YP_{—}146214.1|, ref|YP_{—}001124463.1|, ref|NP_{—}865262.1|, ref|YP_{—}426013.1|, and ref|ZP_{—}01885526.11| (SEQ ID Nos: 190-194) respectively, which all have the function assigned to SEQ ID NO: 188 in Table 1. Amino acids conserved among all sequences are indicted by a “*” and generally conserved amino acids are indicated by a “:”.

[0027] FIGS. 13A and 13B depict a sequence alignment between SEQ ID NO: 205 (RAAC01612) and ref|YP_{—}146215.1|, ref|YP_{—}001124464.1|, ref|YP_{—}074948.1|, ref|YP_{—}001039503.1|, and ref|NP_{—}621770.1| (SEQ ID Nos: 207-211) respectively, which all have the function assigned to SEQ ID NO: 205 in Table 1. Amino acids conserved among all sequences are indicted by a “*” and generally conserved amino acids are indicated by a “:”.

[0028] FIGS. 14A and 14B depict a sequence alignment between SEQ ID NO: 222 (RAAC01926) and ref|YP_{—}001038202.1|, ref|ZP_{—}01667587.1|, ref|ZP_{—}01575301.1|, ref|YP_{—}001211020.1|, and ref|YP_{—}516465.11| (SEQ ID Nos: 224-228) respectively, which all have the function assigned to SEQ ID NO: 222 in Table 1. Amino acids conserved among all sequences are indicted by a “*” and generally conserved amino acids are indicated by a“:”.

[0029] FIG. 15 depicts a sequence alignment between SEQ ID NO: 239 (RAAC01998) and ref|NP_{—}348940.1|, ref|NP_{—}721244.1|, dbj|BAC75700.1|, ref|ZP_{—}00605123.1|, and ref|YP_{—}015329.11| (SEQ ID Nos: 241-245) respectively, which all have the function assigned to SEQ ID NO: 239 in Table 1. Amino acids conserved among all sequences are indicted by a “*” and generally conserved amino acids are indicated by a “:”.

[0030] FIG. 16 depicts a sequence alignment between SEQ ID NO: 256 (RAAC02011) and ref|YP_{—}754819.1|, ref|YP_{—}184322.1|, ref|NP_{—}577787.1|, ref|NP_{—}142068.1|, and ref|NP_{—}125751.1| (SEQ ID Nos: 258-262) respectively, which all have the function assigned to SEQ ID NO: 256 in Table 1. Amino acids conserved among all sequences are indicted by a “*” and generally conserved amino acids are indicated by a“:”.

[0031] FIGS. 17A and 17B depict a sequence alignment between SEQ ID NO: 273 (RAAC02381) and ref|NP_{—}622177.1|, ref|YP_{—}848858.1|, ref|YP_{—}001374688.1|, ref|NP_{—}470039.1|, and ref|ZP_{—}01929325.1| (SEQ ID Nos: 275-279) respectively, which all have the function assigned to SEQ ID NO: 273 in Table 1. Amino acids conserved among all sequences are indicted by a “*” and generally conserved amino acids are indicated by a“:”.

[0032] FIG. 18 depicts a sequence alignment between SEQ ID NO: 290 (RAAC02421) and ref|ZP_{—}01721811.1|, ref|NP_{—}241897.1|, ref|YP_{—}001486101.1|, ref|ZP_{—}01170532.1|, and ref|ZP_{—}02327994.1| (SEQ ID Nos: 292-296) respectively, which all have the function assigned to SEQ ID NO: 290 in Table 1. Amino acids conserved among all sequences are indicted by a “*” and generally conserved amino acids are indicated by a “:”.

[0033] FIG. 19 depicts a sequence alignment between SEQ ID NO: 309 (RAAC01168) and ref|YP_{—}001663880.1|, ref|YP_{—}001181332.1|, ref|YP_{—}675143.1|, ref|YP_{—}002352821.1|, and ref|YP_{—}001114454.11| (SEQ ID Nos: 311-315) respectively, which all have the function assigned to SEQ ID NO: 309 in Table 1. Amino acids conserved among all sequences are indicted by a “*” and generally conserved amino acids are indicated by a “:”.

### DETAILED DESCRIPTION OF THE INVENTION

[0034] Embodiments of the invention include genes and associated proteins related to the glycosylation and/or post-translational modification of proteins of the thermoacidophile Alicyclobacillus acidocaldarius. Coding sequences for genes related to these processes were determined from sequence information generated from sequencing the genome of Alicyclobacillus acidocaldarius. These genes and proteins may represent targets for metabolic engineering of Alicyclobacillus acidocaldarius or other organisms. Non-limiting examples of nucleotide sequences found within the genome of Alicyclobacillus acidocaldarius, and amino acids coded thereby, associated with glycosylation and/or post-translational modification of proteins are listed in Table 1. Glycosyltransferases and/or post-translational modification proteins may be, without limitation, of the following classes: UDP beta-glucosephosphotransferases, Dolichol-phosphate mannosyltransferases, and Glycosyltransferases; and others.

[0035] Embodiments of the invention relate in part to the gene sequences and/or protein sequences comprising genes and/or proteins of Alicyclobacillus acidocaldarius. Genes and proteins included are those which play a role in glycosylation and/or post-translational modification of proteins. Intracellular enzyme activities may be thermophilic and/or acidophilic in nature and general examples of similar genes are described in the literature. Classes of genes, sequences, enzymes and factors include, but are not limited to, those listed in Table 1.

TABLE 1
Alicyclobacillus acidocaldarius genes
and proteins related to glycosylation

| | Protein | | |
|---|---|---|---|
| Reference | Sequence | Gene Sequence | Function |
| RAAC00164 | SEQ ID NO: 1 | SEQ ID NO: 2 | Glycosyltransferase |
| RAAC00517 | SEQ ID NO: 18 | SEQ ID NO: 19 | Glycosyltransferase |
| RAAC00650 | SEQ ID NO: 35 | SEQ ID NO: 36 | Glycosyltransferase |
| RAAC00991 | SEQ ID NO: 52 | SEQ ID NO: 53 | Glycosyltransferase |
| RAAC01110 | SEQ ID NO: 69 | SEQ ID NO: 70 | Glycosyltransferase |
| RAAC01166 | SEQ ID NO: 86 | SEQ ID NO: 87 | UDP beta-glucose- |
| | | | phosphotransferase |
| RAAC01167 | SEQ ID NO: 103 | SEQ ID NO: 104 | Glycosyltransferase |
| RAAC01170 | SEQ ID NO: 120 | SEQ ID NO: 121 | Glycosyltransferase |
| RAAC01248 | SEQ ID NO: 137 | SEQ ID NO: 138 | Glycosyltransferase |
| RAAC01348 | SEQ ID NO: 154 | SEQ ID NO: 155 | Glycosyltransferase |
| RAAC01377 | SEQ ID NO: 171 | SEQ ID NO: 172 | Glycosyltransferase |
| RAAC01611 | SEQ ID NO: 188 | SEQ ID NO: 189 | Glycosyltransferase |
| RAAC01612 | SEQ ID NO: 205 | SEQ ID NO: 206 | Glycosyltransferase |
| RAAC01926 | SEQ ID NO: 222 | SEQ ID NO: 223 | Glycosyltransferase |
| RAAC01998 | SEQ ID NO: 239 | SEQ ID NO: 240 | Glycosyltransferase |
| RAAC02011 | SEQ ID NO: 256 | SEQ ID NO: 257 | Dolichol-phosphate |
| | | | mannosyltransferase |
| RAAC02381 | SEQ ID NO: 273 | SEQ ID NO: 274 | Glycosyltransferase |
| RAAC02421 | SEQ ID NO: 290 | SEQ ID NO: 291 | Glycosyltransferase |
| RAAC01168 | SEQ ID NO: 309 | SEQ ID NO: 310 | Glycosyltransferase |

[0036] The present invention relates to nucleotides sequences comprising isolated and/or purified nucleotide sequences of the genome of Alicyclobacillus acidocaldarius selected from the sequences of SEQ ID Nos. 2, 19, 36, 53, 70, 87, 104, 121, 138, 155, 172, 189, 206, 223, 240, 257, 274, 291, and 310 or one of their fragments.

[0037] The present invention likewise relates to isolated and/or purified nucleotide sequences, characterized in that they comprise at least one of: a) a nucleotide sequence of at least one of the sequences of SEQ ID Nos. 2, 19, 36, 53, 70, 87, 104, 121, 138, 155, 172, 189, 206, 223, 240, 257, 274, 291, and 310 or one of their fragments; b) a nucleotide sequence homologous to a nucleotide sequence such as defined in a); c) a nucleotide sequence complementary to a nucleotide sequence such as defined in a) or b), and a nucleotide sequence of their corresponding RNA; d) a nucleotide sequence capable of hybridizing under stringent conditions with a sequence such as defined in a), b) or c); e) a nucleotide sequence comprising a sequence such as defined in a), b), c) or d); and f) a nucleotide sequence modified by a nucleotide sequence such as defined in a), b), c), d) or e).

[0038] Nucleotide, polynucleotide, or nucleic acid sequence will be understood according to the present invention as meaning both a double-stranded or single-stranded DNA in the monomeric and dimeric (so-called in tandem) forms and the transcription products of said DNAs.

[0039] Aspects of the invention relate nucleotide sequences which it has been possible to isolate, purify or partially purify, starting from separation methods such as, for example, ion-exchange chromatography, by exclusion based on molecular size, or by affinity, or alternatively fractionation techniques based on solubility in different solvents, or starting from methods of genetic engineering such as amplification, cloning, and subcloning, it being possible for the sequences of the invention to be carried by vectors.

[0040] Isolated and/or purified nucleotide sequence fragment according to the invention will be understood as designating any nucleotide fragment of the genome of Alicyclobacillus acidocaldarius, and may include, by way of non-limiting examples, length of at least 8, 12, 20 25, 50, 75, 100, 200, 300, 400, 500, 1000, or more, consecutive nucleotides of the sequence from which it originates.

[0041] Specific fragment of an isolated and/or purified nucleotide sequence according to the invention will be understood as designating any nucleotide fragment of the genome of Alicyclobacillus acidocaldarius, having, after alignment and comparison with the corresponding fragments of genomic sequences of Alicyclobacillus acidocaldarius, at least one nucleotide or base of different nature.

[0042] Homologous isolated and/or purified nucleotide sequence in the sense of the present invention is understood as meaning isolated and/or purified a nucleotide sequence having at least a percentage identity with the bases of a nucleotide sequence according to the invention of at least about 80%, 81%, 82%, 83%, 84%, 85%, 86%, 87%, 88%, 89%, 90%, 91%, 92%, 93%, 94%, 95%, 96%, 97%, 98%, 99%, 99.5%, 99.6%, or 99.7%, this percentage being purely statistical and it being possible to distribute the differences between the two nucleotide sequences at random and over the whole of their length.

[0043] Specific homologous nucleotide sequence in the sense of the present invention is understood as meaning a homologous nucleotide sequence having at least one nucleotide sequence of a specific fragment, such as defined above. Said “specific” homologous sequences can comprise, for example, the sequences corresponding to the genomic sequence or to the sequences of its fragments representative of variants of the genome of Alicyclobacillus acidocaldarius. These specific homologous sequences can thus correspond to variations linked to mutations within strains of Alicyclobacillus acidocaldarius, and especially correspond to truncations, substitutions, deletions and/or additions of at least one nucleotide. Said homologous sequences can likewise correspond to variations linked to the degeneracy of the genetic code.

[0044] The term “degree or percentage of sequence homology” refers to “degree or percentage of sequence identity between two sequences after optimal alignment” as defined in the present application.

[0045] Two amino-acids or nucleotidic sequences are said to be “identical” if the sequence of amino-acids or nucleotidic residues, in the two sequences is the same when aligned for maximum correspondence as described below. Sequence comparisons between two (or more) peptides or polynucleotides are typically performed by comparing sequences of two optimally aligned sequences over a segment or “comparison window” to identify and compare local regions of sequence similarity. Optimal alignment of sequences for comparison may be conducted by the local homology algorithm of Smith and Waterman, Ad. App. Math 2: 482 (1981), by the homology alignment algorithm of Neddleman and Wunsch, J. Mol. Biol. 48: 443 (1970), by the search for similarity method of Pearson and Lipman, Proc. Natl. Acad. Sci. (U.S.A.) 85: 2444 (1988), by computerized implementation of these algorithms (GAP, BESTFIT, FASTA, and TFASTA in the Wisconsin Genetics Software Package, Genetics Computer Group (GCG), 575 Science Dr., Madison, Wis.), or by visual inspection.

[0046] “Percentage of sequence identity” (or degree of identity) is determined by comparing two optimally aligned sequences over a comparison window, where the portion of the peptide or polynucleotide sequence in the comparison window may comprise additions or deletions (i.e., gaps) as compared to the reference sequence (which does not comprise additions or deletions) for optimal alignment of the two sequences. The percentage is calculated by determining the number of positions at which the identical amino-acid residue or nucleic acid base occurs in both sequences to yield the number of matched positions, dividing the number of matched positions by the total number of positions in the window of comparison and multiplying the result by 100 to yield the percentage of sequence identity.

[0047] The definition of sequence identity given above is the definition that would be used by one of skill in the art. The definition by itself does not need the help of any algorithm, said algorithms being helpful only to achieve the optimal alignments of sequences, rather than the calculation of sequence identity.

[0048] From the definition given above, it follows that there is a well defined and only one value for the sequence identity between two compared sequences which value corresponds to the value obtained for the best or optimal alignment.

[0049] In the BLAST N or BLAST P “BLAST 2 sequence”, software which is available in the web site worldwideweb.ncbi.nlm.nih.gov/gorf/b12.html, and habitually used by the inventors and in general by the skilled person for comparing and determining the identity between two sequences, gap cost which depends on the sequence length to be compared is directly selected by the software (i.e. 11.2 for substitution matrix BLOSUM-62 for length>85).

[0050] Complementary nucleotide sequence of a sequence of the invention is understood as meaning any DNA whose nucleotides are complementary to those of the sequence of the invention, and whose orientation is reversed (antisense sequence).

[0051] Hybridization under conditions of stringency with a nucleotide sequence according to the invention is understood as meaning hybridization under conditions of temperature and ionic strength chosen in such a way that they allow the maintenance of the hybridization between two fragments of complementary DNA.

[0052] By way of illustration, conditions of great stringency of the hybridization step with the aim of defining the nucleotide fragments described above are advantageously the following.

[0053] The hybridization is carried out at a preferential temperature of 65° C. in the presence of SSC buffer, 1×SSC corresponding to 0.15 M NaCl and 0.05 M Na citrate. The washing steps, for example, can be the following: 2×SSC, at ambient temperature followed by two washes with 2×SSC, 0.5% SDS at 65° C.; 2×0.5 ×SSC, 0.5% SDS; at 65° C. for 10 minutes each.

[0054] The conditions of intermediate stringency, using, for example, a temperature of 42° C. in the presence of a 2×SSC buffer, or of less stringency, for example a temperature of 37° C. in the presence of a 2×SSC buffer, respectively require a globally less significant complementarity for the hybridization between the two sequences.

[0055] The stringent hybridization conditions described above for a polynucleotide with a size of approximately 350 bases will be adapted by the person skilled in the art for oligonucleotides of greater or smaller size, according to the teaching of Sambrook et al., 1989.

[0056] Among the isolated and/or purified nucleotide sequences according to the invention, are those which can be used as a primer or probe in methods allowing the homologous sequences according to the invention to be obtained, these methods, such as the polymerase chain reaction (PCR), nucleic acid cloning, and sequencing, being well known to the person skilled in the art.

[0057] Among said isolated and/or purified nucleotide sequences according to the invention, those are again preferred which can be used as a primer or probe in methods allowing the presence of SEQ ID Nos. 2, 19, 36, 53, 70, 87, 104, 121, 138, 155, 172, 189, 206, 223, 240, 257, 274, 291, and 310, one of their fragments, or one of their variants such as defined below to be diagnosed.

[0058] The nucleotide sequence fragments according to the invention can be obtained, for example, by specific amplification, such as PCR, or after digestion with appropriate restriction enzymes of nucleotide sequences according to the invention, these methods in particular being described in the work of Sambrook et al., 1989. Such representative fragments can likewise be obtained by chemical synthesis according to methods well known to persons of ordinary skill in the art.

[0059] Modified nucleotide sequence will be understood as meaning any nucleotide sequence obtained by mutagenesis according to techniques well known to the person skilled in the art, and containing modifications with respect to the normal sequences according to the invention, for example mutations in the regulatory and/or promoter sequences of polypeptide expression, especially leading to a modification of the rate of expression of said polypeptide or to a modulation of the replicative cycle.

[0060] Modified nucleotide sequence will likewise be understood as meaning any nucleotide sequence coding for a modified polypeptide such as defined below.

[0061] The present invention relates to nucleotide sequence comprising isolated and/or purified nucleotide sequences of Alicyclobacillus acidocaldarius, characterized in that they are selected from the sequences SEQ ID Nos. 2, 19, 36, 53, 70, 87, 104, 121, 138, 155, 172, 189, 206, 223, 240, 257, 274, 291, and 310 or one of their fragments.

[0062] Embodiments of the invention likewise relate to isolated and/or purified nucleotide sequences characterized in that they comprise a nucleotide sequence selected from: a) at least one of a nucleotide sequence of SEQ ID Nos. 2, 19, 36, 53, 70, 87, 104, 121, 138, 155, 172, 189, 206, 223, 240, 257, 274, 291, and 310 or one of their fragments or one of their fragments; b) a nucleotide sequence of a specific fragment of a sequence such as defined in a); c) a homologous nucleotide sequence having at least 80% identity with a sequence such as defined in a) or b); d) a complementary nucleotide sequence or sequence of RNA corresponding to a sequence such as defined in a), b) or c); and e) a nucleotide sequence modified by a sequence such as defined in a), b), c) or d).

[0063] Among the isolated and/or purified nucleotide sequences according to the invention are the nucleotide sequences of SEQ ID Nos. 13-17, 30-34, 47-51, 64-68, 81-85, 98-102, 115-119, 132-136, 149-153, 166-170, 183-187, 200-204, 217-221, 234-238, 251-255, 268-272, 285-289, 302-306, 319-323, 336-340, 353-357, 370-374, 387-391, 404-408, 421-425, 438-442, 455-459, 472-476, 489-493, 506-510, 523-527, 540-544, 557-561, 574-578, 591-595, 608-612, 625-629, 642-646, 659-663, 676-680, 693-697, 710-714, 727-731, 744-748, 761-765, 778-782, and 321-325, or fragments thereof and any isolated and/or purified nucleotide sequences which have a homology of at least 80%, 81%, 82%, 83%, 84%, 85%, 86%, 87%, 88%, 89%, 90%, 91%, 92%, 93%, 94%, 95%, 96%, 97%, 98%, 99%, 99.5%, 99.6%, or 99.7% identity with the at least one of the sequences of SEQ ID Nos. 2, 19, 36, 53, 70, 87, 104, 121, 138, 155, 172, 189, 206, 223, 240, 257, 274, 291, and 310 or fragments thereof. Said homologous sequences can comprise, for example, the sequences corresponding to the genomic sequences Alicyclobacillus acidocaldarius. In the same manner, these specific homologous sequences can correspond to variations linked to mutations within strains of Alicyclobacillus acidocaldarius and especially correspond to truncations, substitutions, deletions and/or additions of at least one nucleotide. As will be apparent to one of ordinary skill in the art, such homologues are easily created and identified using standard techniques and publicly available computer programs such as BLAST. As such, each homologue referenced above should be considered as set forth herein and fully described.

[0064] Embodiments of the invention comprise the isolated and/or purified polypeptides coded for by a nucleotide sequence according to the invention, or fragments thereof, whose sequence is represented by a fragment. Amino acid sequences corresponding to the isolated and/or purified polypeptides which can be coded for according to one of the three possible reading frames of at least one of the sequences of SEQ ID Nos. 2, 19, 36, 53, 70, 87, 104, 121, 138, 155, 172, 189, 206, 223, 240, 257, 274, 291, and 310.

[0065] Embodiments of the invention likewise relate to the isolated and/or purified polypeptides, characterized in that they comprise a polypeptide selected from at least one of the amino acid sequences of SEQ ID Nos. 1, 18, 35, 52, 69, 86, 103, 120, 137, 154, 171, 188, 205, 222, 239, 256, 273, 290, and 309 or one of their fragments.

[0066] Among the isolated and/or purified polypeptides, according to embodiments of the invention, are the isolated and/or purified polypeptides of amino acid sequence SEQ ID Nos. 8-12, 25-29, 42-46, 59-63, 76-80, 93-97, 110-114, 127-131, 144-148, 161-165, 178-182, 195-199, 212-216, 229-233, 246-250, 263-267, 280-284, 297-301, 314-318, 331-335, 348-352, 365-369, 382-386, 399-403, 416-420, 433-437, 450-454, 467-471, 484-488, 501-505, 518-522, 535-539, 552-556, 569-573, 586-590, 603-607, 620-624, 637-641, 654-658, 671-675, 688-692, 705-709, 722-726, 739-743, 756-760, 773-777, and 316-320, or fragments thereof or any other isolated and/or purified polypeptides which have a homology of at least 80%, 81%, 82%, 83%, 84%, 85%, 86%, 87%, 88%, 89%, 90%, 91%, 92%, 93%, 94%, 95%, 96%, 97%, 98%, 99%, 99.5%, 99.6%, or 99.7% identity with at least one of the sequences of SEQ ID Nos. 1, 18, 35, 52, 69, 86, 103, 120, 137, 154, 171, 188, 205, 222, 239, 256, 273, 290, and 309 or fragments thereof. As will be apparent to one of ordinary skill in the art, such homologues are easily created and identified using standard techniques and publicly available computer programs such as BLAST. As such, each homologue referenced above should be considered as set forth herein and fully described.

[0067] Embodiments of the invention also relate to the polypeptides, characterized in that they comprise a polypeptide selected from: a) a specific fragment of at least 5 amino acids of a polypeptide of an amino acid sequence according to the invention; b) a polypeptide homologous to a polypeptide such as defined in a); c) a specific biologically active fragment of a polypeptide such as defined in a) or b); and d) a polypeptide modified by a polypeptide such as defined in a), b) or c).

[0068] In the present description, the terms polypeptide, peptide and protein are interchangeable.

[0069] In embodiments of the invention, the isolated and/or purified polypeptides according to the invention may be glycosylated, pegylated, and/or otherwise post-translationally modified. In further embodiments, glycosylation, pegylation, and/or other post-translational modifications may occur in vivo or in vitro and/or may be performed using chemical techniques. In additional embodiments, any glycosylation, pegylation and/or other post-translational modifications may be N-linked or O-linked.

[0070] In embodiments of the invention any one of the isolated and/or purified polypeptides according to the invention may be enzymatically or functionally active at temperatures at or above about 25, 30, 35, 40, 45, 50, 55, 60, 65, 70, 75, 80, 85, 90, and/or 95 degrees Celsius and/or may be enzymatically or functionally active at a pH at, below, and/or above 8, 7, 6, 5, 4, 3, 2, 1, and/or 0. In further embodiments of the invention, glycosylation, pegylation, and/or other post-translational modification may be required for the isolated and/or purified polypeptides according to the invention to be enzymatically or functionally active at pH at or below 8, 7, 6, 5, 4, 3, 2, 1, and/or 0 or at a temperatures at or above about 25, 30, 35, 40, 45, 50, 55, 60, 65, 70, 75, 80, 85, 90, and/or 95 degrees Celsius.

[0071] Aspects of the invention relate to polypeptides that are isolated or obtained by purification from natural sources, or else obtained by genetic recombination, or alternatively by chemical synthesis and that they may thus contain unnatural amino acids, as will be described below.

[0072] A “polypeptide fragment” according to the embodiments of the invention is understood as designating a polypeptide containing at least 5 consecutive amino acids, preferably 10 consecutive amino acids or 15 consecutive amino acids.

[0073] In the present invention, a specific polypeptide fragment is understood as designating the consecutive polypeptide fragment coded for by a specific fragment nucleotide sequence according to the invention.

[0074] “Homologous polypeptide” will be understood as designating the polypeptides having, with respect to the natural polypeptide, certain modifications such as, in particular, a deletion, addition, or substitution of at least one amino acid, a truncation, a prolongation, a chimeric fusion, and/or a mutation. Among the homologous polypeptides, those are preferred whose amino acid sequence has at least 80% or 90%, homology with the sequences of amino acids of polypeptides according to the invention.

[0075] “Specific homologous polypeptide” will be understood as designating the homologous polypeptides such as defined above and having a specific fragment of polypeptide according to the invention.

[0076] In the case of a substitution, one or more consecutive or nonconsecutive amino acids are replaced by “equivalent” amino acids. The expression “equivalent” amino acid is directed here at designating any amino acid capable of being substituted by one of the amino acids of the base structure without, however, essentially modifying the biological activities of the corresponding peptides and such that they will be defined by the following. As will be apparent to one of ordinary skill in the art, such substitutions are easily created and identified using standard molecular biology techniques and publicly available computer programs such as BLAST. As such, each substitution referenced above should be considered as set forth herein and fully described. Examples of such substitutions in the amino acid sequences SEQ ID Nos. 1, 18, 35, 52, 69, 86, 103, 120, 137, 154, 171, 188, 205, 222, 239, 256, 273, 290, and 309 may include those isolated and/or purified polypeptides of amino acid sequence SEQ ID Nos. 8-12, 25-29, 42-46, 59-63, 76-80, 93-97, 110-114, 127-131, 144-148, 161-165, 178-182, 195-199, 212-216, 229-233, 246-250, 263-267, 280-284, 297-301, 314-318, 331-335, 348-352, 365-369, 382-386, 399-403, 416-420, 433-437, 450-454, 467-471, 484-488, 501-505, 518-522, 535-539, 552-556, 569-573, 586-590, 603-607, 620-624, 637-641, 654-658, 671-675, 688-692, 705-709, 722-726, 739-743, 756-760, 773-777, and 316-320. These equivalent amino acids may be determined either by depending on their structural homology with the amino acids which they substitute, or on results of comparative tests of biological activity between the different polypeptides, which are capable of being carried out.

[0077] By way of nonlimiting example, the possibilities of substitutions capable of being carried out without resulting in an extensive modification of the biological activity of the corresponding modified polypeptides will be mentioned, the replacement, for example, of leucine by valine or isoleucine, of aspartic acid by glutamic acid, of glutamine by asparagine, of arginine by lysine etc., the reverse substitutions naturally being envisageable under the same conditions.

[0078] In a further embodiment, substitutions are limited to substitutions in amino acids not conserved among other proteins which have similar identified enzymatic activity. For example, one of ordinary skill in the art may align proteins of the same function in similar organisms and determine which amino acids are generally conserved among proteins of that function. One example of a program that may be used to generate such alignments is wordlwideweb.charite.de/bioinf/strap/ in conjunction with the databases provided by the NCBI. Examples of such polypeptides may include, but are not limited to, those found in amino acid sequence SEQ ID Nos. 8-12, 25-29, 42-46, 59-63, 76-80, 93-97, 110-114, 127-131, 144-148, 161-165, 178-182, 195-199, 212-216, 229-233, 246-250, 263-267, 280-284, 297-301, 314-318, 331-335, 348-352, 365-369, 382-386, 399-403, 416-420, 433-437, 450-454, 467-471, 484-488, 501-505, 518-522, 535-539, 552-556, 569-573, 586-590, 603-607, 620-624, 637-641, 654-658, 671-675, 688-692, 705-709, 722-726, 739-743, 756-760, 773-777, and 316-320.

[0079] Thus, according to one embodiment of the invention, substitutions or mutation may be made at positions that are generally conserved among proteins of that function. In a further embodiment, nucleic acid sequences may be mutated or substituted such that the amino acid they code for is unchanged (degenerate substitutions and/mutations) and/or mutated or substituted such that any resulting amino acid substitutions or mutation are made at positions that are generally conserved among proteins of that function. Examples of such nucleic acid sequences may include, but are not limited to, those found in are the nucleotide sequences of SEQ ID Nos. 13-17, 30-34, 47-51, 64-68, 81-85, 98-102, 115-119, 132-136, 149-153, 166-170, 183-187, 200-204, 217-221, 234-238, 251-255, 268-272, 285-289, 302-306, 319-323, 336-340, 353-357, 370-374, 387-391, 404-408, 421-425, 438-442, 455-459, 472-476, 489-493, 506-510, 523-527, 540-544, 557-561, 574-578, 591-595, 608-612, 625-629, 642-646, 659-663, 676-680, 693-697, 710-714, 727-731, 744-748, 761-765, 778-782, and 321-325 or fragments thereof.

[0080] The specific homologous polypeptides likewise correspond to polypeptides coded for by the specific homologous nucleotide sequences such as defined above and thus comprise in the present definition the polypeptides which are mutated or correspond to variants which can exist in Alicyclobacillus acidocaldarius, and which especially correspond to truncations, substitutions, deletions, and/or additions of at least one amino acid residue.

[0081] “Specific biologically active fragment of a polypeptide” according to an embodiment of the invention will be understood in particular as designating a specific polypeptide fragment, such as defined above, having at least one of the characteristics of polypeptides according to the invention. In certain embodiments the peptide is capable of behaving as at least one of the types of proteins outlined in Table 1.

[0082] The polypeptide fragments according to embodiments of the invention can correspond to isolated or purified fragments naturally present in Alicyclobacillus acidocaldarius or correspond to fragments which can be obtained by cleavage of said polypeptide by a proteolytic enzyme, such as trypsin or chymotrypsin or collagenase, or by a chemical reagent, such as cyanogen bromide (CNBr). Such polypeptide fragments can likewise just as easily be prepared by chemical synthesis, from hosts transformed by an expression vector according to the invention containing a nucleic acid allowing the expression of said fragments, placed under the control of appropriate regulation and/or expression elements.

[0083] “Modified polypeptide” of a polypeptide according to an embodiment of the invention is understood as designating a polypeptide obtained by genetic recombination or by chemical synthesis as will be described below, having at least one modification with respect to the normal sequence. These modifications may or may not be able to bear on amino acids at the origin of specificity, and/or of activity, or at the origin of the structural conformation, localization, and of the capacity of membrane insertion of the polypeptide according to the invention. It will thus be possible to create polypeptides of equivalent, increased, or decreased activity, and of equivalent, narrower, or wider specificity. Among the modified polypeptides, it is necessary to mention the polypeptides in which up to 5 or more amino acids can be modified, truncated at the N- or C-terminal end, or even deleted or added.

[0084] The methods allowing said modulations on eukaryotic or prokaryotic cells to be demonstrated are well known to the person of ordinary skill in the art. It is likewise well understood that it will be possible to use the nucleotide sequences coding for said modified polypeptides for said modulations, for example through vectors according to the invention and described below.

[0085] The preceding modified polypeptides can be obtained by using combinatorial chemistry, in which it is possible to systematically vary parts of the polypeptide before testing them on models, cell cultures or microorganisms for example, to select the compounds which are most active or have the properties sought.

[0086] Chemical synthesis likewise has the advantage of being able to use unnatural amino acids, or nonpeptide bonds.

[0087] Thus, in order to improve the duration of life of the polypeptides according to the invention, it may be of interest to use unnatural amino acids, for example in D form, or else amino acid analogs, especially sulfur-containing forms, for example.

[0088] Finally, it will be possible to integrate the structure of the polypeptides according to the invention, its specific or modified homologous forms, into chemical structures of polypeptide type or others. Thus, it may be of interest to provide at the N- and C-terminal ends molecules not recognized by proteases.

[0089] The nucleotide sequences coding for a polypeptide according to the invention are likewise part of the invention.

[0090] The invention likewise relates to nucleotide sequences utilizable as a primer or probe, characterized in that said sequences are selected from the nucleotide sequences according to the invention.

[0091] It is well understood that the present invention, in various embodiments, likewise relates to specific polypeptides of Alicyclobacillus acidocaldarius, coded for by nucleotide sequences, capable of being obtained by purification from natural polypeptides, by genetic recombination or by chemical synthesis by procedures well known to the person skilled in the art and such as described in particular below. In the same manner, the labeled or unlabeled mono- or polyclonal antibodies directed against said specific polypeptides coded for by said nucleotide sequences are also encompassed by the invention.

[0092] Embodiments of the invention additionally relate to the use of a nucleotide sequence according to the invention as a primer or probe for the detection and/or the amplification of nucleic acid sequences.

[0093] The nucleotide sequences according to embodiments of the invention can thus be used to amplify nucleotide sequences, especially by the PCR technique (polymerase chain reaction) (Erlich, 1989; Innis et al., 1990; Rolfs et al., 1991; and White et al., 1997).

[0094] These oligodeoxyribonucleotide or oligoribonucleotide primers advantageously have a length of at least 8 nucleotides, preferably of at least 12 nucleotides, and even more preferentially at least 20 nucleotides.

[0095] Other amplification techniques of the target nucleic acid can be advantageously employed as alternatives to PCR.

[0096] The nucleotide sequences of the invention, in particular the primers according to the invention, can likewise be employed in other procedures of amplification of a target nucleic acid, such as: the TAS technique (Transcription-based Amplification System), described by Kwoh et al. in 1989; the 3SR technique (Self-Sustained Sequence Replication), described by Guatelli et al. in 1990; the NASBA technique (Nucleic Acid Sequence Based Amplification), described by Kievitis et al. in 1991; the SDA technique (Strand Displacement Amplification) (Walker et al., 1992); the TMA technique (Transcription Mediated Amplification).

[0097] The polynucleotides of the invention can also be employed in techniques of amplification or of modification of the nucleic acid serving as a probe, such as: the LCR technique (Ligase Chain Reaction), described by Landegren et al. in 1988 and improved by Barany et al. in 1991, which employs a thermostable ligase; the RCR technique (Repair Chain Reaction), described by Segev in 1992; the CPR technique (Cycling Probe Reaction), described by Duck et al. in 1990; the amplification technique with Q-beta replicase, described by Miele et al. in 1983 and especially improved by Chu et al. in 1986, Lizardi et al. in 1988, then by Burg et al. as well as by Stone et al. in 1996.

[0098] In the case where the target polynucleotide to be detected is possibly an RNA, for example an mRNA, it will be possible to use, prior to the employment of an amplification reaction with the aid of at least one primer according to the invention or to the employment of a detection procedure with the aid of at least one probe of the invention, an enzyme of reverse transcriptase type in order to obtain a cDNA from the RNA contained in the biological sample. The cDNA obtained will thus serve as a target for the primer(s) or the probe(s) employed in the amplification or detection procedure according to the invention.

[0099] The detection probe will be chosen in such a manner that it hybridizes with the target sequence or the amplicon generated from the target sequence. By way of sequence, such a probe will advantageously have a sequence of at least 12 nucleotides, in particular of at least 20 nucleotides, and preferably of at least 100 nucleotides.

[0100] Embodiments of the invention also comprise the nucleotide sequences utilizable as a probe or primer according to the invention, characterized in that they are labeled with a radioactive compound or with a nonradioactive compound.

[0101] The unlabeled nucleotide sequences can be used directly as probes or primers, although the sequences are generally labeled with a radioactive isotope (³²P, ³⁵S, ³H, ¹²⁵I) or with a nonradioactive molecule (biotin, acetylaminofluorene, digoxigenin, 5-bromodeoxyuridine, fluorescein) to obtain probes which are utilizable for numerous applications.

[0102] Examples of nonradioactive labeling of nucleotide sequences are described, for example, in French Patent No. 78.10975 or by Urdea et al. or by Sanchez-Pescador et al. in 1988.

[0103] In the latter case, it will also be possible to use one of the labeling methods described in patents FR-2 422 956 and FR-2 518 755.

[0104] The hybridization technique can be carried out in various manners (Matthews et al., 1988). The most general method consists in immobilizing the nucleic acid extract of cells on a support (such as nitrocellulose, nylon, polystyrene) and in incubating, under well-defined conditions, the immobilized target nucleic acid with the probe. After hybridization, the excess of probe is eliminated and the hybrid molecules formed are detected by the appropriate method (measurement of the radioactivity, of the fluorescence or of the enzymatic activity linked to the probe).

[0105] The invention, in various embodiments, likewise comprises the nucleotide sequences according to the invention, characterized in that they are immobilized on a support, covalently or noncovalently.

[0106] According to another advantageous mode of employing nucleotide sequences according to the invention, the latter can be used immobilized on a support and can thus serve to capture, by specific hybridization, the target nucleic acid obtained from the biological sample to be tested. If necessary, the solid support is separated from the sample and the hybridization complex formed between said capture probe and the target nucleic acid is then detected with the aid of a second probe, a so-called detection probe, labeled with an easily detectable element.

[0107] Another aspect of the present invention is a vector for the cloning and/or expression of a sequence, characterized in that it contains a nucleotide sequence according to the invention.

[0108] The vectors according to the invention, characterized in that they contain the elements allowing the integration, expression and/or the secretion of said nucleotide sequences in a determined host cell, are likewise part of the invention.

[0109] The vector may then contain a promoter, signals of initiation and termination of translation, as well as appropriate regions of regulation of transcription. It may be able to be maintained stably in the host cell and can optionally have particular signals specifying the secretion of the translated protein. These different elements may be chosen as a function of the host cell used. To this end, the nucleotide sequences according to the invention may be inserted into autonomous replication vectors within the chosen host, or integrated vectors of the chosen host.

[0110] Such vectors will be prepared according to the methods currently used by the person skilled in the art, and it will be possible to introduce the clones resulting therefrom into an appropriate host by standard methods, such as, for example, lipofection, electroporation, and thermal shock.

[0111] The vectors according to the invention are, for example, vectors of plasmid or viral origin. One example of a vector for the expression of polypeptides of the invention is baculovirus.

[0112] These vectors are useful for transforming host cells in order to clone or to express the nucleotide sequences of the invention.

[0113] The invention likewise comprises the host cells transformed by a vector according to the invention.

[0114] These cells can be obtained by the introduction into host cells of a nucleotide sequence inserted into a vector such as defined above, then the culturing of said cells under conditions allowing the replication and/or expression of the transfected nucleotide sequence.

[0115] The host cell can be selected from prokaryotic or eukaryotic systems, such as, for example, bacterial cells (Olins and Lee, 1993), but likewise yeast cells (Buckholz, 1993), as well as plants cells, such as Arabidopsis sp., and animal cells, in particular the cultures of mammalian cells (Edwards and Aruffo, 1993), for example, Chinese hamster ovary (CHO) cells, but likewise the cells of insects in which it is possible to use procedures employing baculoviruses, for example sf9 insect cells (Luckow, 1993).

[0116] Embodiments of the invention likewise relate to organisms comprising one of said transformed cells according to the invention.

[0117] The obtainment of transgenic organisms according to the invention expressing one or more of the genes of Alicyclobacillus acidocaldarius or part of the genes may be carried out in, for example, rats, mice, or rabbits according to methods well known to the person skilled in the art, such as by viral or nonviral transfections. It will be possible to obtain the transgenic organisms expressing one or more of said genes by transfection of multiple copies of said genes under the control of a strong promoter of ubiquitous nature, or selective for one type of tissue. It will likewise be possible to obtain the transgenic organisms by homologous recombination in embryonic cell strains, transfer of these cell strains to embryos, selection of the affected chimeras at the level of the reproductive lines, and growth of said chimeras.

[0118] The transformed cells as well as the transgenic organisms according to the invention are utilizable in procedures for preparation of recombinant polypeptides.

[0119] It is today possible to produce recombinant polypeptides in relatively large quantity by genetic engineering using the cells transformed by expression vectors according to the invention or using transgenic organisms according to the invention.

[0120] The procedures for preparation of a polypeptide of the invention in recombinant form, characterized in that they employ a vector and/or a cell transformed by a vector according to the invention and/or a transgenic organism comprising one of said transformed cells according to the invention are themselves comprised in the present invention.

[0121] As used herein, “transformation” and “transformed” relate to the introduction of nucleic acids into a cell, whether prokaryotic or eukaryotic. Further, “transformation” and “transformed,” as used herein, need not relate to growth control or growth deregulation.

[0122] Among said procedures for preparation of a polypeptide of the invention in recombinant form, the preparation procedures employing a vector, and/or a cell transformed by said vector and/or a transgenic organism comprising one of said transformed cells, containing a nucleotide sequence according to the invention coding for a polypeptide of Alicyclobacillus acidocaldarius.

[0123] A variant according to the invention may consist of producing a recombinant polypeptide fused to a “carrier” protein (chimeric protein). The advantage of this system is that it may allow stabilization of and/or a decrease in the proteolysis of the recombinant product, an increase in the solubility in the course of renaturation in vitro and/or a simplification of the purification when the fusion partner has an affinity for a specific ligand.

[0124] More particularly, the invention relates to a procedure for preparation of a polypeptide of the invention comprising the following steps: a) culture of transformed cells under conditions allowing the expression of a recombinant polypeptide of nucleotide sequence according to the invention; b) if need be, recovery of said recombinant polypeptide.

[0125] When the procedure for preparation of a polypeptide of the invention employs a transgenic organism according to the invention, the recombinant polypeptide is then extracted from said organism.

[0126] The invention also relates to a polypeptide which is capable of being obtained by a procedure of the invention such as described previously.

[0127] The invention also comprises a procedure for preparation of a synthetic polypeptide, characterized in that it uses a sequence of amino acids of polypeptides according to the invention.

[0128] The invention likewise relates to a synthetic polypeptide obtained by a procedure according to the invention.

[0129] The polypeptides according to the invention can likewise be prepared by techniques which are conventional in the field of the synthesis of peptides. This synthesis can be carried out in homogeneous solution or in solid phase.

[0130] For example, recourse can be made to the technique of synthesis in homogeneous solution described by Houben-Weyl in 1974.

[0131] This method of synthesis consists in successively condensing, two by two, the successive amino acids in the order required, or in condensing amino acids and fragments formed previously and already containing several amino acids in the appropriate order, or alternatively several fragments previously prepared in this way, it being understood that it will be necessary to protect beforehand all the reactive functions carried by these amino acids or fragments, with the exception of amine functions of one and carboxyls of the other or vice-versa, which must normally be involved in the formation of peptide bonds, especially after activation of the carboxyl function, according to the methods well known in the synthesis of peptides.

[0132] Recourse may also be made to the technique described by Merrifield.

[0133] To make a peptide chain according to the Merrifield procedure, recourse is made to a very porous polymeric resin, on which is immobilized the first C-terminal amino acid of the chain. This amino acid is immobilized on a resin through its carboxyl group and its amine function is protected. The amino acids which are going to form the peptide chain are thus immobilized, one after the other, on the amino group, which is deprotected beforehand each time, of the portion of the peptide chain already formed, and which is attached to the resin. When the whole of the desired peptide chain has been formed, the protective groups of the different amino acids forming the peptide chain are eliminated and the peptide is detached from the resin with the aid of an acid.

[0134] The invention additionally relates to hybrid polypeptides having at least one polypeptide according to the invention, and a sequence of a polypeptide capable of inducing an immune response in man or animals.

[0135] Advantageously, the antigenic determinant is such that it is capable of inducing a humoral and/or cellular response.

[0136] It will be possible for such a determinant to comprise a polypeptide according to the invention in glycosylated, pegylated, and/or otherwise post-translationally modified form used with a view to obtaining immunogenic compositions capable of inducing the synthesis of antibodies directed against multiple epitopes.

[0137] These hybrid molecules can be formed, in part, of a polypeptide carrier molecule or of fragments thereof according to the invention, associated with a possibly immunogenic part, in particular an epitope of the diphtheria toxin, the tetanus toxin, a surface antigen of the hepatitis B virus (patent FR 79 21811), the VP1 antigen of the poliomyelitis virus or any other viral or bacterial toxin or antigen.

[0138] The procedures for synthesis of hybrid molecules encompass the methods used in genetic engineering for constructing hybrid nucleotide sequences coding for the polypeptide sequences sought. It will be possible, for example, to refer advantageously to the technique for obtainment of genes coding for fusion proteins described by Minton in 1984.

[0139] Said hybrid nucleotide sequences coding for a hybrid polypeptide as well as the hybrid polypeptides according to the invention characterized in that they are recombinant polypeptides obtained by the expression of said hybrid nucleotide sequences are likewise part of the invention.

[0140] The invention likewise comprises the vectors characterized in that they contain one of said hybrid nucleotide sequences. The host cells transformed by said vectors, the transgenic organisms comprising one of said transformed cells as well as the procedures for preparation of recombinant polypeptides using said vectors, said transformed cells and/or said transgenic organisms are, of course, likewise part of the invention.

[0141] The polypeptides according to the invention, the antibodies according to the invention described below and the nucleotide sequences according to the invention can advantageously be employed in procedures for the detection and/or identification of Alicyclobacillus acidocaldarius, in a sample capable of containing them. These procedures, according to the specificity of the polypeptides, the antibodies and the nucleotide sequences according to the invention which will be used, will in particular be able to detect and/or to identify Alicyclobacillus acidocaldarius.

[0142] The polypeptides according to the invention can advantageously be employed in a procedure for the detection and/or the identification of Alicyclobacillus acidocaldarius in a sample capable of containing them, characterized in that it comprises the following steps: a) contacting of this sample with a polypeptide or one of its fragments according to the invention (under conditions allowing an immunological reaction between said polypeptide and the antibodies possibly present in the biological sample); b) demonstration of the antigen-antibody complexes possibly formed.

[0143] Any conventional procedure can be employed for carrying out such a detection of the antigen-antibody complexes possibly formed.

[0144] By way of example, a preferred method brings into play immunoenzymatic processes according to the ELISA technique, by immunofluorescence, or radioimmunological processes (RIA) or their equivalent.

[0145] Thus, the invention likewise relates to the polypeptides according to the invention, labeled with the aid of an adequate label, such as, of the enzymatic, fluorescent or radioactive type.

[0146] Such methods comprise, for example, the following steps: deposition of determined quantities of a polypeptide composition according to the invention in the wells of a microtiter plate, introduction into said wells of increasing dilutions of serum, or of a biological sample other than that defined previously, having to be analyzed, incubation of the microtiter plate, introduction into the wells of the microtiter plate of labeled antibodies directed against pig immunoglobulins, the labeling of these antibodies having been carried out with the aid of an enzyme selected from those which are capable of hydrolyzing a substrate by modifying the absorption of the radiation of the latter, at least at a determined wavelength, for example at 550 nm, detection, by comparison with a control test, of the quantity of hydrolyzed substrate.

[0147] The polypeptides according to the invention allow monoclonal or polyclonal antibodies to be prepared which are characterized in that they specifically recognize the polypeptides according to the invention. It will advantageously be possible to prepare the monoclonal antibodies from hybridomas according to the technique described by Kohler and Milstein in 1975. It will be possible to prepare the polyclonal antibodies, for example, by immunization of an animal, in particular a mouse, with a polypeptide or a DNA, according to the invention, associated with an adjuvant of the immune response, and then purification of the specific antibodies contained in the serum of the immunized animals on an affinity column on which the polypeptide which has served as an antigen has previously been immobilized. The polyclonal antibodies according to the invention can also be prepared by purification, on an affinity column on which a polypeptide according to the invention has previously been immobilized, of the antibodies contained in the serum of an animal immunologically challenged by Alicyclobacillus acidocaldarius, or a polypeptide or fragment according to the invention.

[0148] The invention likewise relates to mono- or polyclonal antibodies or their fragments, or chimeric antibodies, characterized in that they are capable of specifically recognizing a polypeptide according to the invention.

[0149] It will likewise be possible for the antibodies of the invention to be labeled in the same manner as described previously for the nucleic probes of the invention, such as a labeling of enzymatic, fluorescent or radioactive type.

[0150] The invention is additionally directed at a procedure for the detection and/or identification of Alicyclobacillus acidocaldarius in a sample, characterized in that it comprises the following steps: a) contacting of the sample with a mono- or polyclonal antibody according to the invention (under conditions allowing an immunological reaction between said antibodies and the polypeptides of Alicyclobacillus acidocaldarius possibly present in the biological sample); b) demonstration of the antigen-antibody complex possibly formed.

[0151] The present invention likewise relates to a procedure for the detection and/or the identification of Alicyclobacillus acidocaldarius in a sample, characterized in that it employs a nucleotide sequence according to the invention.

[0152] More particularly, the invention relates to a procedure for the detection and/or the identification of Alicyclobacillus acidocaldarius in a sample, characterized in that it contains the following steps: a) if need be, isolation of the DNA from the sample to be analyzed; b) specific amplification of the DNA of the sample with the aid of at least one primer, or a pair of primers, according to the invention; c) demonstration of the amplification products.

[0153] These can be detected, for example, by the technique of molecular hybridization utilizing a nucleic probe according to the invention. This probe will advantageously be labeled with a nonradioactive (cold probe) or radioactive isotope.

[0154] For the purposes of the present invention, “DNA of the biological sample” or “DNA contained in the biological sample” will be understood as meaning either the DNA present in the biological sample considered, or possibly the cDNA obtained after the action of an enzyme of reverse transcriptase type on the RNA present in said biological sample.

[0155] A further embodiment of the invention comprises a method, characterized in that it comprises the following steps: a) contacting of a nucleotide probe according to the invention with a biological sample, the DNA contained in the biological sample having, if need be, previously been made accessible to hybridization under conditions allowing the hybridization of the probe with the DNA of the sample; b) demonstration of the hybrid formed between the nucleotide probe and the DNA of the biological sample.

[0156] The present invention also relates to a procedure according to the invention, characterized in that it comprises the following steps: a) contacting of a nucleotide probe immobilized on a support according to the invention with a biological sample, the DNA of the sample having, if need be, previously been made accessible to hybridization, under conditions allowing the hybridization of the probe with the DNA of the sample; b) contacting of the hybrid formed between the nucleotide probe immobilized on a support and the DNA contained in the biological sample, if need be after elimination of the DNA of the biological sample which has not hybridized with the probe, with a nucleotide probe labeled according to the invention; c) demonstration of the novel hybrid formed in step b).

[0157] According to an advantageous embodiment of the procedure for detection and/or identification defined previously, this is characterized in that, prior to step a), the DNA of the biological sample is first amplified with the aid of at least one primer according to the invention.

[0158] Embodiments of methods include glycosylating or post-translationally modifying a first polypeptide using a second polypeptide selected from the group consisting of a polypeptide having at least 90% sequence identity to SEQ ID Nos. 1, 18, 35, 52, 69, 86, 103, 120, 137, 154, 171, 188, 205, 222, 239, 256, 273, 290, and 309.

[0159] Further embodiments of methods include methods of modulating protein stability, solubility, degradation, activity profile, and/or externalization of a first polypeptide, the methods comprising glycosylating or post-translationally modifying the first polypeptide via a second polypeptide selected from the group consisting of a polypeptide having at least 90% sequence identity to SEQ ID Nos. 1, 18, 35, 52, 69, 86, 103, 120, 137, 154, 171, 188, 205, 222, 239, 256, 273, 290, and 309.

[0160] Further embodiments of methods include placing a cell producing or encoding a recombinant, purified, and/or isolated nucleotide sequence comprising a nucleotide sequence selected from the group consisting of a nucleotide sequences having at least 90% sequence identity to at least one of the sequences of SEQ ID NOs: 2, 19, 36, 53, 70, 87, 104, 121, 138, 155, 172, 189, 206, 223, 240, 257, 274, 291, and 310 and/or a recombinant, purified, and/or isolated polypeptide selected from the group consisting of a polypeptide having at least 90% sequence identity to at least one of the sequences of SEQ ID Nos. 1, 18, 35, 52, 69, 86, 103, 120, 137, 154, 171, 188, 205, 222, 239, 256, 273, 290, and 309 in a environment comprising temperatures at or above about 25, 30, 35, 40, 45, 50, 55, 60, 65, 70, 75, 80, 85, 90, and/or 95 degrees Celsius and/or a pH at, below, and/or above 8, 7, 6, 5, 4, 3, 2, 1, and/or 0

[0161] The present invention provides cells that have been genetically manipulated to have an altered capacity to produce expressed proteins. In particular, the present invention relates to Gram-positive microorganisms, such as Bacillus species having enhanced expression of a protein of interest, wherein one or more chromosomal genes have been inactivated, and/or wherein one or more chromosomal genes have been deleted from the Bacillus chromosome. In some further embodiments, one or more indigenous chromosomal regions have been deleted from a corresponding wild-type Bacillus host chromosome. In further embodiments, the Bacillus is an Alicyclobacillus sp. or Alicyclobacillus acidocaldarius.

[0162] In additional embodiments, methods of glycosylating and/or post-translationally modifying a polypeptide at temperatures at or above about 25, 30, 35, 40, 45, 50, 55, 60, 65, 70, 75, 80, 85, 90, and/or 95 degrees Celsius and/or at a pH at, below, and/or above 8, 7, 6, 5, 4, 3, 2, 1, and/or 0 via a recombinant, purified, and/or isolated nucleotide sequence comprising a nucleotide sequence selected from the group consisting of a nucleotide sequences having at least 90% sequence identity to at least one of the sequences of SEQ ID NOs: 2, 19, 36, 53, 70, 87, 104, 121, 138, 155, 172, 189, 206, 223, 240, 257, 274, 291, and 310 and/or a recombinant, purified, and/or isolated polypeptide selected from the group consisting of a polypeptide having at least 90% sequence identity to at least one of the sequences of SEQ ID Nos. 1, 18, 35, 52, 69, 86, 103, 120, 137, 154, 171, 188, 205, 222, 239, 256, 273, 290, and 309.

[0163] In embodiments of the invention any one of the isolated and/or purified polypeptides according to the invention may be enzymatically or functionally active at temperatures at or above about 25, 30, 35, 40, 45, 50, 55, 60, 65, 70, 75, 80, 85, 90, and/or 95 degrees Celsius and/or may be enzymatically or functionally active at a pH at, below, and/or above 8, 7, 6, 5, 4, 3, 2, 1, and/or 0. In further embodiments of the invention, glycosylation, pegylation, and/or other posttranslational modification may be required for the isolated and/or purified polypeptides according to the invention to be enzymatically or functionally active at pH at or below 8, 7, 6, 5, 4, 3, 2, 1, and/or 0 or at a temperatures at or above about 25, 30, 35, 40, 45, 50, 55, 60, 65, 70, 75, 80, 85, 90, and/or 95 degrees Celsius.

[0164] The invention is described in additional detail in the following illustrative examples. Although the examples may represent only selected embodiments of the invention, it should be understood that the following examples are illustrative and not limiting.

### EXAMPLES

### Example 1

### Glycosylation Using Nucleotide and Amino Acid Sequences from Alicyclobacillus acidocaldarius

[0165] Provided in SEQ ID NO: 2, 19, 36, 53, 70, 87, 104, 121, 138, 155, 172, 189, 206, 223, 240, 257, 274, 291, and 310 are a nucleotide sequences isolated from Alicyclobacillus acidocaldarius and coding for the polypeptides of SEQ ID NO: 1, 18, 35, 52, 69, 86, 103, 120, 137, 154, 171, 188, 205, 222, 239, 256, 273, 290, and 309, respectively. The nucleotide sequences of SEQ ID NOs: 2, 19, 36, 53, 70, 87, 104, 121, 138, 155, 172, 189, 206, 223, 240, 257, 274, 291, and 310 are placed into expression vectors using techniques standard in the art. The vectors are then provided to cells such as bacteria cells or eukaryotic cells such as Sf9 cells or CHO cells. In conjunction with the normal machinery in present in the cells, the vectors comprising SEQ ID NOs: 2, 19, 36, 53, 70, 87, 104, 121, 138, 155, 172, 189, 206, 223, 240, 257, 274, 291, and 310 produce the polypeptides of SEQ ID NOs: 1, 18, 35, 52, 69, 86, 103, 120, 137, 154, 171, 188, 205, 222, 239, 256, 273, 290, and 309. The polypeptides of SEQ ID NOs: 1, 18, 35, 52, 69, 86, 103, 120, 137, 154, 171, 188, 205, 222, 239, 256, 273, 290, and 309 are then isolated and/or purified. The isolated and/or purified polypeptides of SEQ ID NOs: 1, 18, 35, 52, 69, 86, 103, 120, 137, 154, 171, 188, 205, 222, 239, 256, 273, 290, and 309 are then each demonstrated to have one or more of the activities provided in Table 1.

[0166] The isolated and/or purified polypeptides of SEQ ID NOs: 1, 18, 35, 52, 69, 86, 103, 120, 137, 154, 171, 188, 205, 222, 239, 256, 273, 290, and 309 are demonstrated to have activity in glycosylating other proteins in conjunction with other proteins or cellular components.

### Example 2

### Modulating Protein Stability, Solubility, Degradation, Activity Profile, and/or Externalization of a First Polypeptide Using Nucleotide and Amino Acid Sequences from Alicyclobacillus acidocaldarius

[0167] The polypeptides and nucleotide sequence of Example 1 are used to post-translationally modify one or more other proteins through glycosylation or other post-translational modification. The modified proteins are demonstrated to have altered protein stability, solubility, degradation, activity profile, and/or externalization in comparison to non-modified proteins of the same or similar amino acid sequence.

### Example 3

### Glycosylated Proteins of Alicyclobacillus acidocaldarius

[0168] Polypeptide RAAC02676 (SEQ ID NO:307) was obtained via the following protocol. Alicyclobacillus acidocaldarius was cultured on wheat arabinoxylan and harvested after three days. The culture was centrifuged to remove cells and the resulting supernatant was filtered with a 0.22 micron filter to remove any remaining debris. The filtered supernatant was concentrated to approximately 1 mL by ultrafiltration through a 10,000 Da molecular weight cutoff membrane. The resulting concentrated filtered supernatant was additionally purified by trapping proteins on a cation exchange column, eluting them with a salt gradient, reloading them on a second cation exchange column and eluting with a second salt gradient. Samples were pooled and run on a 12% SDS-PAGE gel. Individual bands were cut from the gel and subjected to in gel trypic digestion. The peptide fragments were then eluted and separated on a C-18 column an injected into an ion trap mass spectrometer via electrospray. Mass spectra were run through MASCOT which compares the observed spectra to theoretical spectra generated from the known protein sequence. MASCOT allows the user to specify modifications that might exist on the protein and looks for spectra consistent with these modifications. MASCOT identified a number of peptides digested from RAAC02676 that were potentially glycosylated as provided in Table 2 below.

[0169] As can be seen in Table 2, Queries 94, 96, 221, 332, 333, 337, and 400 returned expected glycosylations on RAAC02676. All fragments in Table 2 are fragments of SEQ ID NO:307 (RAAC02676). A glycosylated version of RAAC02676 according to the sites determined is provided in SEQ ID NO:308.

TABLE 2

| Query | Observed | Mr(expt) | Mr(calc) | ppm | Miss | Score | Expect | Rank | Peptide |
|---|---|---|---|---|---|---|---|---|---|
| 17 | 398.1406 | 794.2667 | 794.4174 | −189.65 | 0 | (24) | 73 | 1 | K.YGDIVTK.N |
| 18 | 398.1591 | 794.3037 | 794.4174 | −143.08 | 0 | (28) | 38 | 2 | K.YGDIVTK.N |
| 19 | 398.1596 | 794.3047 | 794.4174 | −141.82 | 0 | 55 | 0.073 | 1 | K.YGDIVTK.N |
| 20 | 398.1621 | 794.3097 | 794.4174 | −135.53 | 0 | (41) | 1.7 | 1 | K.YGDIVTK.N |
| 77 | 569.1781 | 1136.3417 | 1136.5461 | −179.86 | 0 | (46) | 0.41 | 1 | R.EINAYAGSNAK. |
| | | | | | | | | | N |
| 78 | 569.1796 | 1136.3447 | 1136.5461 | −177.22 | 0 | 62 | 0.011 | 1 | R.EINAYAGSNAK. |
| | | | | | | | | | N |
| 94 | 579.6776 | 1157.3407 | 1157.5676 | −196.02 | 0 | 34 | 6.9 | 1 | R.QNGLSPSDLAR. |
| | | | | | | | | | T + Glyc-Asn (N) |
| 96 | 579.7071 | 1157.3997 | 1157.5676 | −145.05 | 0 | (20) | 2.5e+02 | 3 | R.QNGLSPSDLAR. |
| | | | | | | | | | T + Glyc-Asn (N) |
| 138 | 721.2386 | 1440.4627 | 1440.7394 | −192.07 | 0 | (62) | 0.019 | 1 | R.EPNGDIALMLV |
| | | | | | | | | | NR.S |
| 139 | 721.2411 | 1440.4677 | 1440.7394 | −188.60 | 0 | 82 | 0.00022 | 1 | R.EPNGDIALMLV |
| | | | | | | | | | NR.S |
| 207 | 987.8796 | 1973.7447 | 1974.0098 | −134.27 | 0 | (130) | 6.2e−09 | 1 | R.AVGLFYQSFLTE |
| | | | | | | | | | IGQSSK.A |
| 208 | 987.8796 | 1973.7447 | 1974.0098 | −134.27 | 0 | (123) | 2.8e−08 | 1 | R.AVGLFYQSFLTE |
| | | | | | | | | | IGQSSK.A |
| 209 | 987.8801 | 1973.7457 | 1974.0098 | −133.76 | 0 | (71) | 0.0045 | 1 | R.AVGLFYQSFLTE |
| | | | | | | | | | IGQSSK.A |
| 210 | 987.8986 | 1973.7827 | 1974.0098 | −115.02 | 0 | 140 | 5.9e−10 | 1 | R.AVGLFYQSFLTE |
| | | | | | | | | | IGQSSK.A |
| 216 | 661.1822 | 1980.5247 | 1980.8966 | −187.71 | 0 | (37) | 4.1 | 1 | R.WPGGSISDVYN |
| | | | | | | | | | WETNTR.N |
| 217 | 991.3196 | 1980.6247 | 1980.8966 | −137.23 | 0 | (59) | 0.053 | 1 | R.WPGGSISDVYN |
| | | | | | | | | | WETNTR.N |
| 218 | 991.3411 | 1980.6677 | 1980.8966 | −115.52 | 0 | (42) | 3.6 | 1 | R.WPGGSISDVYN |
| | | | | | | | | | WETNTR.N |
| 219 | 991.3461 | 1980.6777 | 1980.8966 | −110.47 | 0 | (31) | 40 | 1 | R.WPGGSISDVYN |
| | | | | | | | | | WETNTR.N |
| 221 | 991.8396 | 1981.6647 | 1981.8806 | −108.91 | 0 | 85 | 0.00016 | 1 | R.WPGGSISDVYN |
| | | | | | | | | | WETNTR.N + Glyc- |
| | | | | | | | | | Asn (N) |
| 265 | 731.9392 | 2192.7957 | 2193.2117 | −189.66 | 0 | 69 | 0.0086 | 1 | R.GSNAAQILQTL |
| | | | | | | | | | QSISPLLSPR.A |
| 266 | 1097.4561 | 2192.8977 | 2193.2117 | −143.15 | 0 | (31) | 56 | 1 | R.GSNAAQILQTL |
| | | | | | | | | | QSISPLLSPR.A |
| 286 | 1133.4606 | 2264.9067 | 2265.1892 | −124.70 | 0 | (31) | 58 | 2 | R.SPSTIYSADLNV |
| | | | | | | | | | LGVGPYAITK.A |
| 287 | 1133.4786 | 2264.9427 | 2265.1892 | −108.81 | 0 | (48) | 0.95 | 1 | R.SPSTIYSADLNV |
| | | | | | | | | | LGVGPYAITK.A |
| 288 | 1133.4811 | 2264.9477 | 2265.1892 | −106.60 | 0 | 70 | 0.0073 | 1 | R.SPSTIYSADLNV |
| | | | | | | | | | LGVGPYAITK.A |
| 289 | 756.1595 | 2265.4567 | 2265.1892 | 118 | 0 | (21) | 4.5e+02 | 9 | R.SPSTIYSADLNV |
| | | | | | | | | | LGVGPYAITK.A |
| 309 | 1177.9986 | 2353.9827 | 2354.2481 | −112.72 | 0 | 68 | 0.012 | 1 | K.ALVYGEGSSAV |
| | | | | | | | | | SPALTLPTAHSVK. |
| | | | | | | | | | L |
| 310 | 1178.0016 | 2353.9887 | 2354.2481 | −110.17 | 0 | (51) | 0.59 | 1 | K.ALVYGEGSSAV |
| | | | | | | | | | SPALTLPTAHSVK. |
| | | | | | | | | | L |
| 311 | 1178.0086 | 2354.0027 | 2354.2481 | −104.22 | 0 | (54) | 0.26 | 1 | K.ALVYGEGSSAV |
| | | | | | | | | | SPALTLPTAHSVK. |
| | | | | | | | | | L |
| 319 | 1182.9381 | 2363.8617 | 2364.1346 | −115.41 | 0 | (91) | 5.1e−05 | 1 | R.TWSSFETQVDP |
| | | | | | | | | | QGAAQTALATR.I |
| 320 | 1182.9386 | 2363.8627 | 2364.1346 | −114.99 | 0 | (109) | 7.9e−07 | 1 | R.TWSSFETQVDP |
| | | | | | | | | | QGAAQTALATR.I |
| 321 | 1182.9416 | 2363.8687 | 2364.1346 | −112.45 | 0 | (115) | 2.1e−07 | 1 | R.TWSSFETQVDP |
| | | | | | | | | | QGAAQTALATR.I |
| 322 | 1182.9781 | 2363.9417 | 2364.1346 | −81.57 | 0 | (83) | 0.00036 | 1 | R.TWSSFETQVDP |
| | | | | | | | | | QGAAQTALATR.I |
| 323 | 1182.9866 | 2363.9587 | 2364.1346 | −74.38 | 0 | 126 | 1.6e−08 | 1 | R.TWSSFETQVDP |
| | | | | | | | | | QGAAQTALATR.I |
| 324 | 789.1825 | 2364.5257 | 2364.1346 | 165 | 0 | (17) | 1.1e+03 | 9 | R.TWSSFETQVDP |
| | | | | | | | | | QGAAQTALATR.I |
| 330 | 1188.3281 | 2374.6417 | 2374.1851 | 192 | 0 | 88 | 7.6e−05 | 1 | K.GNPGLSPQAYA |
| | | | | | | | | | QNALQFIQAMR.A |
| 332 | 1188.4176 | 2374.8207 | 2375.1691 | −146.69 | 0 | (72) | 0.0042 | 1 | K.GNPGLSPQAYA |
| | | | | | | | | | QNALQFIQAMR.A + |
| | | | | | | | | | Glyc-Asn (N) |
| 333 | 1188.4181 | 2374.8217 | 2375.1691 | −146.26 | 0 | (76) | 0.0019 | 1 | K.GNPGLSPQAYA |
| | | | | | | | | | QNALQFIQAMR.A + |
| | | | | | | | | | Glyc-Asn (N) |
| 337 | 1188.9406 | 2375.8667 | 2376.1531 | −120.54 | 0 | (66) | 0.017 | 1 | K.GNPGLSPQAYA |
| | | | | | | | | | QNALQFIQAMR.A + |
| | | | | | | | | | 2 Glyc-Asn (N) |
| 397 | 1288.5416 | 2575.0687 | 2575.3605 | −113.30 | 0 | (130) | 8.2e−09 | 1 | R.QASSSIVGNALA |
| | | | | | | | | | QAASLSPTISAYLR. |
| | | | | | | | | | Q |
| 398 | 1288.5621 | 2575.1097 | 2575.3605 | −97.38 | 0 | 135 | 2.6e−09 | 1 | R.QASSSIVGNALA |
| | | | | | | | | | QAASLSPTISAYLR. |
| | | | | | | | | | Q |
| 399 | 859.5002 | 2575.4787 | 2575.3605 | 45.9 | 0 | (64) | 0.034 | 1 | R.QASSSIVGNALA |
| | | | | | | | | | QAASLSPTISAYLR. |
| | | | | | | | | | Q |
| 400 | 859.8579 | 2576.5517 | 2576.3445 | 80.4 | 0 | (74) | 0.0035 | 1 | R.QASSSIVGNALA |
| | | | | | | | | | QAASLSPTISAYLR. |
| | | | | | | | | | Q + Glyc-Asn (N) |

### Example 4

### Glycoprotein Staining of Proteins from Alicyclobacillus acidocaldarius

[0170] Alicyclobacillus acidocaldarius was cultured on wheat arabinoxylan and harvested after three days. The culture was centrifuged to remove cells and the resulting supernatant was filtered with a 0.22 micron filter to remove any remaining debris. The filtered supernatant was concentrated to approximately 1 mL by ultrafiltration through a 10,000 Da molecular weight cutoff membrane. Several lanes of this concentrated material were run on a 12% SDS-PAGE gel along with a positive and negative control that are known glycosylated and non-glycosylated proteins using standard protocols. The gel was cut in half vertically and one half stained using Simply Blue Safe Stain and the other half using a glycoprotein detection kit form Sigma. The positive and negative controls both stained using the Simply Blue stain and only the positive control stained with the glycoprotein stain indicating that the staining protocol was working correctly. The Alicyclobacillus acidocaldarius protein lanes revealed a band at approximately 120 kDa on the Simply Blue stained gel which is the expected weight of one extracellular protein of Alicyclobacillus acidocaldarius. The same position on the glycoprotein stained gel showed pink bands indicating a positive result for a glycosylated protein.

[0171] All references, including publications, patents, and patent applications, cited herein are hereby incorporated by reference to the same extent as if each reference were individually and specifically indicated to be incorporated by reference and were set forth in its entirety herein.

[0172] While this invention has been described in certain embodiments, the present invention can be further modified within the spirit and scope of this disclosure. This application is therefore intended to cover any variations, uses, or adaptations of the invention using its general principles. Further, this application is intended to cover such departures from the present disclosure as come within known or customary practice in the art to which this invention pertains and which fall within the limits of the appended claims and their legal equivalents.

### BIBLIOGRAPHIC REFERENCES

[0173] Barany, F., 1991, PNAS. USA, 88: 189-193.
[0174] Borman, S., 2006, Glycosylation Engineering. Chem. Eng. News, 84(36): 13-22.
[0175] Buckholz, R. G., 1993, Yeast systems for the expression of heterologous gene products. Curr. Op. Biotechnology 4: 538-542.
[0176] Burg, J. L. et al., 1996, Mol. and Cell. Probes, 10: 257-271.
[0177] Chu, B. C. F. et al., 1986, NAR, 14: 5591-5603.
[0178] Duck, P. et al., 1990, Biotechniques, 9: 142-147.
[0179] Edwards, C. P., and Aruffo, A., 1993, Current applications of COS cell based transient expression systems. Curr. Op. Biotechnology 4: 558-563.
[0180] Guateli, J. C. et al., 1990, PNAS. USA, 87: 1874-1878.
[0181] Houben-Weyl, 1974, in Methode der Organischen Chemie, E. Wunsch Ed., Volume 15-1 and 15-11, Thieme, Stuttgart.
[0182] Innis, M. A. et al., 1990, in PCR Protocols. A guide to Methods and Applications, San Diego, Academic Press.
[0183] Kievitis, T. et al., 1991, J. Virol. Methods, 35: 273-286.
[0184] Kohler, G. et al., 1975, Nature, 256(5517): 495497.
[0185] Kwoh, D. Y. et al., 1989, PNAS. USA, 86: 1173-1177.
[0186] Luckow, V. A., 1993, Baculovirus systems for the expression of human gene products. Curr. Op. Biotechnology 4: 564-572.
[0187] Matthews, J. A. et al., 1988, Anal. Biochem., 169: 1-25.
[0188] Merrifield, R. D., 1966, J. Am. Chem. Soc., 88(21): 5051-5052.
[0189] Miele, E. A. et al., 1983, J. Mol. Biol., 171: 281-295.
[0190] Olins, P. O., and Lee, S. C., 1993, Recent advances in heterologous gene expression in E. coli. Curr. Op. Biotechnology 4: 520-525.
[0191] Rolfs, A. et al., 1991, In PCR Topics. Usage of Polymerase Chain reaction in Genetic and Infectious Disease. Berlin: Springer-Verlag.
[0192] Sambrook, J. et al., 1989, In Molecular cloning: A Laboratory Manual. Cold Spring Harbor, N.Y.: Cold Spring Harbor Laboratory Press.
[0193] Sanchez-Pescador, R., 1988, J. Clin. Microbiol., 26(10): 1934-1938.
[0194] Segev D., 1992, in “Non-radioactive Labeling and Detection of Biomolecules”. Kessler C. Springer Verlag, Berlin, New-York: 197-205.
[0195] Schäffer, C. et al., 2001, Prokaryotic glycosylation. Proteomics, 1: 248-261.
[0196] Schwermann, B. et al., 1994, Purification, properties and structural aspects of a thermoacidophilic α-amylase from Alicyclobacillus acidocaldarius ATCC 27009, insight into acidostability of proteins. Eur. J. Biochem. 226: 981-991.
[0197] Upreti et al., 2003, Bacterial glycoproteins: Functions, biosynthesis and applications. Proteomics, 3: 363-379.

[0198] Urdea, M. S., 1988, Nucleic Acids Research, II: 4937-4957.
[0199] Walker, G. T. et al., 1992, NAR 20: 1691-1696.
[0200] Walker, G. T. et al., 1992, PNAS. USA, 89: 392-396.
[0201] White, B. A. et al., 1997, Methods in Molecular Biology, 67, Humana Press, Totowa, N.J.

The application's sequence listing, which the Patent Office published only in electronic form, follows.

SEQUENCE LISTING (325 sequences)

SEQ ID NO: 1 - protein, 385 aa, Alicyclobacillus acidocaldarius
MSMRIAMFTETFLPSTDGIVTRLCATLKYLEREGHEVLLFAPSGSPETYASATIVGIPAMPFILYPEKRYSLPLPRIGKHLRAFRPDLIHVVNPAFLGIGGIYYAWKSHLPLVASYHTNVPAYARHYKLEFLEPLLWWYFRTLHNRAHLNLATSRATLRELERQGFQNLELWERGVDVELFRNAPYSEEMRRRLAPEAKPGDRVLLYVGRLASEKNIERMRPVLDAIPDLHLAIVGDGPHRPELERVFAGTRTHFTGYLHGEELAQAYRAADAFLFPSTTETLGLVLFEAMAAGLPIVAADSPPTREVLEDGRAGFIFDPDSTESLIATVDLVMRDEARREAVRQRGLAIAEQLDWEGPSKQLLGHYERVLQSFSVVAGAVTGTR

SEQ ID NO: 2 - DNA, 1158 bp, Alicyclobacillus acidocaldarius
gtgagcatgaggatcgcgatgtttacggagacgtttctgccgtcgaccgacgggatcgtcaccaggctctgtgcaacgctgaaatacttggagcgcgagggccacgaggtgctgctgttcgccccgtcgggatcgccggagacctacgcttccgcaaccatcgtcgggatccctgcgatgccgttcatcctgtatccagaaaagcgatactcgttgccgctgccgcgcatcggcaaacatctgcgggcgtttcggccggatctcatccacgtggtgaatccggcgttcctcggcatcgggggcatctactacgcgtggaagtctcatctgccgctggtggcctcgtatcacaccaacgtgccggcctacgctcgccactacaagctggagtttctcgagcccctgttgtggtggtactttcggacgctgcacaaccgggctcacctgaacctcgccacgtctcgcgcgacgctgcgagagctggagcgccaggggtttcagaatctggagctctgggagcgcggcgtggacgtggagctgttccgaaatgctccgtacagcgaggagatgcgccgccgcctggcgcccgaagcgaagccgggcgatcgcgtcctgctgtacgtggggcgcttggcgtcggaaaagaatatcgagcgcatgcgcccggtcctggacgccatcccggatctgcacctcgccatcgtcggcgacggcccgcaccgccctgaactcgagcgcgtgttcgccgggacgcggacccacttcaccggatacctccatggggaggagttggcgcaggcgtatcgcgccgcggacgccttcttgtttccgtcgaccactgagacgctcgggctggtcttgtttgaggcgatggcggccggccttcccatcgtggcggcggacagcccgcccacgcgcgaggtcctcgaggacggccgggcgggattcatcttcgatcccgattcgaccgagtccctcatcgcgaccgtcgatctcgtgatgcgggacgaagcgaggcgagaggcggtcagacagcgcggcttggccatcgcggagcagctggattgggaggggccgagcaagcaactgctcggtcactacgagcgagtcttgcagtcgttcagcgtcgtcgcgggcgccgtcaccggcacccgctga

SEQ ID NO: 3 - protein, 382 aa, Synechococcus sp. WH 7803
MKIAFFTETFLPKVDGIVTRLTKTVKHLVDAGDEVIVFCPEGCPEEYMGARLIGVPAMPLPLYPELKLALPRPAVSEAIDSFQPDLIHVVNPAVLGLGGIWLAKAKSIPLVASYHTHLPKYLEHYGMGMLEPLLWELLKAAHNQALLNLCTSTAMVQELSDKGIQHTDLWQRGVDTELFRPDLRSAELRQRLLGRHDDRGALLLYVGRLSAEKQIERIKPVLEALPDARLALVGDGPHRQQLEKHFEGTATTFVGYLAGEELAGAYASGDAFLFPSSTETLGLVLLEAMAAGCPVVGANRGGIPDIISDGVNGCLYEPDGADGGAASLIAATQRLLGNDVERQALRNAARSEAERWGWAGATEQLRGYYRQVLKQPQLNAAA

SEQ ID NO: 4 - protein, 375 aa, Synechococcus sp. CC9311
MKIAFFTETFLPKVDGIVTRLTKTVKHLVDAGDEVVVFCPEGAPSHYMGAKVVGVPAMPLPLYPELKLALPRPAVSEAIDAFQPDLIHVVNPAVLGLGGIWLAKTKSIPLIASYHTHLPKYLEHYGMGMLEPLLWELLKAAHNQAVLNLCTSTAMVQELSDKGIQHTALWQRGVDTELFRPELRSPELRQRLLGEYDDRGALLLYVGRLSAEKQIERIRPVLEALPDTRLALVGDGPHRQQLEKHFEGTATTFVGYLAGEELAGAYASGDAFLFPSSTETLGLVLLEAMAAGCPVVGANRGGIPDIISDGVNGCLYEPDGADAGAGSLIEATGKLLGNDLERQALRNAARSEAERWGWAGATEQLRGYYRQVLSS

SEQ ID NO: 5 - protein, 368 aa, Synechococcus sp. WH 5701
MKIALFTETFLPKVDGIVTRLTKTVEHLVRAGDEVLLFCPEGAPSLYMGARVIGVPALPLPLYPELKLALPRPAVAEALEAFQPDVVHVVNPAVLGLGGIWMARTRQIPLVASYHTHLPKYLEHYGMGVLEPLLWELLKAAHNQAVLNLCTSSVMVEELAQRGIQHTALWQRGVDTEMFRPELRSDAMRRRLMGRHPDSDSLLLYVGRLSAEKQIERIRPVLDALPQARLALVGDGPHRAQLEKVFEGTATTFVGYLGGEELAGAFASADAFLFPSSTETLGLVLLEAMAAGCPVVGANRGGIPDIVTDGVNGCLYDPDDDASLTAATLRLLASPERREQLRLAARHEAERWGWAGATAQLRRFYRDV

SEQ ID NO: 6 - protein, 374 aa, Synechococcus sp. RS9917
MKIAFFTETFLPKVDGIVTRLTKTVKHLVEAGDEVLVFCPEGAPSEYMGAGVIGVPAMPLPLYPELKLALPRPAVSEAIDAFQPDLVHVVNPAVLGLGGIWLAKNKAIPLIASYHTHLPKYLEHYGMGMLEPLLWELLKAAHNQAELNLCTSTAMVKELSEKGIQHTALWQRGVDTELFRPELRSDAMRQRLLGAHDDRCALLLYVGRLSAEKQIERIRPVLEALPDTRLALVGDGPHRQQLERHFEGTATTFVGYLAGEELASAYASGDAFLFPSSTETLGLVLLEAMAAGCPVVGANRGGIPDIISDGLNGCLYEPDGADGGAASLIQATQRLLGNDLERQALRRAARTEAERWGWAGATEQLRTYYRNVLK

SEQ ID NO: 7 - protein, 374 aa, Synechococcus sp. RS9916
MKVAFFTETFLPKVDGIVTRLTKTVKHLVDAGDEVMVFCPEGCPDNYMGAKLVGVPAMPLPLYPELKLALPRPAVSDAIDAFQPDLIHVVNPAVLGLGGIWLAKTKGIPLVASYHTHLPKYLEHYGMGMLEPLLWEMLKAAHNQALLNLCTSTAMVKELSEKGIQHTDLWQRGVDTDLFRPELRSETMRQRLLGRHDDRGSLLLYVGRLSAEKQIERIKPVLEALPDTRLALVGDGPHRQQLEKHFEGTATTFVGYLAGEELASAYASGDAFLFPSSTETLGLVLLEAMAAGCPVVGANRGGIPDIISDGINGCLYEPDGADEGAASLINAARKLLGNDIERQGLRTAARSEAERWGWAGATEQLRGYYRQVLQ

SEQ ID NO: 8 - protein, 385 aa, Artificial
  Substituion in SEQ ID NO 1
MSMRIAMFTETFLPSTDGIVTRLCATLKYLEREGHEVLLFAPSGSPETYASATIVGIPAMPFILYPEKRYSLPLPRIGKHLRAFRPDLIHVVNPAFLGIGGIYYAWKSHLPLVASYHTNVPAYARHYKLEFLEPLLWWYFRTLHNRAHLNLATSRATLRELERQGFQNLELWERGVDVELFRNAPYSEEMRRRLAPEAKPGDRVLLYVGRLASEKNIERMRPVLDAIPDLHLAIVGDGPHRPELERVFAGTRTHFTGYLHGEELAQAYRAADAFLFPSTTETLGLVLFEAMAAGLPIVAADSPPTREVLEDGRAGFIFDPDSTESLIATVDLVMRDEARREAVRQRGLAIAEQLDWEGPSKQLLGHYERVLNSFSVVAGAVTGTR

SEQ ID NO: 9 - protein, 385 aa, Artificial
  Substituion in SEQ ID NO 1
MSMRIAMFTETFLPSTDGIVTRLCATLKYLEREGHEVLLFAPSGSPETYASATIVGIPAMPFILYPEKRYSLPLPRIGKHLRAFRPDLIHVVNPAFLGIGGIYYAWKSHLPLVASYHTNVPAYARHYKLEFLEPLLWWYFRTLHNRAHLNLATSRATLRELERQGFQNLELWERGVDVELFRNAPYSEEMRRRLAPEAKPGDRVLLYVGRLASEKNIERMRPVLDAIPDLHLAIVGDGPHRPELERVFAGTRTHFTGYLHGEELAQAYRAADAFLFPSTTETLGLVLFEAMAAGLPIVAADSPPTREVLEDGRAGFIFDPDSTESLIATVDLVMRDEARREAVRQRGLAIAEQLDWEGPSKQLLGHYERVLQSFSIVAGAVTGTR

SEQ ID NO: 10 - protein, 385 aa, Artificial
  Substituion in SEQ ID NO 1
MSMRIAMFTETFLPSTDGIVTRLCATLKYLEREGHEVLLFAPSGSPETYASATIVGIPAMPFILYPEKRYSLPIPRIGKHLRAFRPDLIHVVNPAFLGIGGIYYAWKSHLPLVASYHTNVPAYARHYKLEFLEPLLWWYFRTLHNRAHLNLATSRATLRELERQGFQNLELWERGVDVELFRNAPYSEEMRRRLAPEAKPGDRVLLYVGRLASEKNIERMRPVLDAIPDLHLAIVGDGPHRPELERVFAGTRTHFTGYLHGEELAQAYRAADAFLFPSTTETLGLVLFEAMAAGLPIVAADSPPTREVLEDGRAGFIFDPDSTESLIATVDLVMRDEARREAVRQRGLAIAEQLDWEGPSKQLLGHYERVLQSFSVVAGAVTGTR

SEQ ID NO: 11 - protein, 385 aa, Artificial
  Substituion in SEQ ID NO 1
MSMRIAMFTETFLPSTDGIVTRLCATLKYLEREGHEVLLFAPSGSPETYASATIVGIPAMPFILYPEKRYSLPLPRIGKHLRAFRPDLIHVVNPAFLGIGGIYYAWKSHLPLVASYHTNVPAYARHYKLEFLEPLLWWYFRTLHNRAHLNLATSRATLRELERQGFQNLELWERGVDVELFRNAPYSEEMRRRLAPEAKPGDRVLLYVGRLASEKNIERMRPVLDAIPDLHLAIVGDGPHRPELERVFAGTRTHFTGYLHGEELAQAYRAADAFLFPSTTETLGLVLFEAMAAGLPIVAADSPPTREVLEDGRAGFIFDPDSTESLLATVDLVMRDEARREAVRQRGLAIAEQLDWEGPSKQLLGHYERVLQSFSVVAGAVTGTR

SEQ ID NO: 12 - protein, 385 aa, Artificial
  Substituion in SEQ ID NO 1
MSMRIAMFTETFLPSTDGIVTRLCATLKYLEREGHEVLLFAPSGSPETYASATIVGIPAMPFILYPEKRYSLPLPRIGKHLRAFRPDLIHVVNPAFLGIGGIYYAWKSHLPLVASYHTNVPAYARHYKLEFLEPLLWWYFRTLHNRAHLNLATSRATLRELERQGFQNLELWERGVDVELFRNAPYSDEMRRRLAPEAKPGDRVLLYVGRLASEKNIERMRPVLDAIPDLHLAIVGDGPHRPELERVFAGTRTHFTGYLHGEELAQAYRAADAFLFPSTTETLGLVLFEAMAAGLPIVAADSPPTREVLEDGRAGFIFDPDSTESLIATVDLVMRDEARREAVRQRGLAIAEQLDWEGPSKQLLGHYERVLQSFSVVAGAVTGTR

SEQ ID NO: 13 - DNA, 1158 bp, Artificial
  Substituion in SEQ ID NO 2
gtgagcatgaggatcgcgatgtttacggagacgtttctgccgtcgaccgacgggatcgtcaccaggctctgtgcaacgctgaaatacttggagcgcgagggccacgaggtgctgctgttcgccccgtcgggatcgccggagacctacgcttccgcaaccatcgtcgggatccctgcgatgccgttcatcctgtatccagaaaagcgatactcgttgccgctgccgcgcatcggcaaacatctgcgggcgtttcggccggatctcatccacgtggtgaatccggcgttcctcggcatcgggggcatctactacgcgtggaagtctcatctgccgctggtggcctcgtatcacaccaacgtgccggcctacgctcgccactacaagctggagtttctcgagcccctgttgtggtggtactttcggacgctgcacaaccgggctcacctgaacctcgccacgtctcgcgcgacgctgcgagagctggagcgccaggggtttcagaatctggagctctgggagcgcggcgtggacgtggagctgttccgaaatgctccgtacagcgaggagatgcgccgccgcctggcgcccgaagcgaagccgggcgatcgcgtcctgctgtacgtggggcgcttggcgtcggaaaagaatatcgagcgcatgcgcccggtcctggacgccatcccggatctgcacctcgccatcgtcggcgacggcccgcaccgccctgaactcgagcgcgtgttcgccgggacgcggacccacttcaccggatacctccatggggaggagttggcgcaggcgtatcgcgccgcggacgccttcttgtttccgtcgaccactgagacgctcgggctggtcttgtttgaggcgatggcggccggccttcccatcgtggcggcggacagcccgcccacgcgcgaggtcctcgaggacggccgggcgggattcatcttcgatcccgattcgaccgagtccctcatcgcgaccgtcgatctcgtgatgcgggacgaagcgaggcgagaggcggtcagacagcgcggcttggccatcgcggagcagctggattgggaggggccgagcaagcaactgctcggtcactacgagcgagtcttgaattcgttcagcgtcgtcgcgggcgccgtcaccggcacccgctga

SEQ ID NO: 14 - DNA, 1158 bp, Artificial
  Substituion in SEQ ID NO 2
gtgagcatgaggatcgcgatgtttacggagacgtttctgccgtcgaccgacgggatcgtcaccaggctctgtgcaacgctgaaatacttggagcgcgagggccacgaggtgctgctgttcgccccgtcgggatcgccggagacctacgcttccgcaaccatcgtcgggatccctgcgatgccgttcatcctgtatccagaaaagcgatactcgttgccgctgccgcgcatcggcaaacatctgcgggcgtttcggccggatctcatccacgtggtgaatccggcgttcctcggcatcgggggcatctactacgcgtggaagtctcatctgccgctggtggcctcgtatcacaccaacgtgccggcctacgctcgccactacaagctggagtttctcgagcccctgttgtggtggtactttcggacgctgcacaaccgggctcacctgaacctcgccacgtctcgcgcgacgctgcgagagctggagcgccaggggtttcagaatctggagctctgggagcgcggcgtggacgtggagctgttccgaaatgctccgtacagcgaggagatgcgccgccgcctggcgcccgaagcgaagccgggcgatcgcgtcctgctgtacgtggggcgcttggcgtcggaaaagaatatcgagcgcatgcgcccggtcctggacgccatcccggatctgcacctcgccatcgtcggcgacggcccgcaccgccctgaactcgagcgcgtgttcgccgggacgcggacccacttcaccggatacctccatggggaggagttggcgcaggcgtatcgcgccgcggacgccttcttgtttccgtcgaccactgagacgctcgggctggtcttgtttgaggcgatggcggccggccttcccatcgtggcggcggacagcccgcccacgcgcgaggtcctcgaggacggccgggcgggattcatcttcgatcccgattcgaccgagtccctcatcgcgaccgtcgatctcgtgatgcgggacgaagcgaggcgagaggcggtcagacagcgcggcttggccatcgcggagcagctggattgggaggggccgagcaagcaactgctcggtcactacgagcgagtcttgcagtcgttcagcattgtcgcgggcgccgtcaccggcacccgctga

SEQ ID NO: 15 - DNA, 1158 bp, Artificial
  Substituion in SEQ ID NO 2
gtgagcatgaggatcgcgatgtttacggagacgtttctgccgtcgaccgacgggatcgtcaccaggctctgtgcaacgctgaaatacttggagcgcgagggccacgaggtgctgctgttcgccccgtcgggatcgccggagacctacgcttccgcaaccatcgtcgggatccctgcgatgccgttcatcctgtatccagaaaagcgatactcgttgccgattccgcgcatcggcaaacatctgcgggcgtttcggccggatctcatccacgtggtgaatccggcgttcctcggcatcgggggcatctactacgcgtggaagtctcatctgccgctggtggcctcgtatcacaccaacgtgccggcctacgctcgccactacaagctggagtttctcgagcccctgttgtggtggtactttcggacgctgcacaaccgggctcacctgaacctcgccacgtctcgcgcgacgctgcgagagctggagcgccaggggtttcagaatctggagctctgggagcgcggcgtggacgtggagctgttccgaaatgctccgtacagcgaggagatgcgccgccgcctggcgcccgaagcgaagccgggcgatcgcgtcctgctgtacgtggggcgcttggcgtcggaaaagaatatcgagcgcatgcgcccggtcctggacgccatcccggatctgcacctcgccatcgtcggcgacggcccgcaccgccctgaactcgagcgcgtgttcgccgggacgcggacccacttcaccggatacctccatggggaggagttggcgcaggcgtatcgcgccgcggacgccttcttgtttccgtcgaccactgagacgctcgggctggtcttgtttgaggcgatggcggccggccttcccatcgtggcggcggacagcccgcccacgcgcgaggtcctcgaggacggccgggcgggattcatcttcgatcccgattcgaccgagtccctcatcgcgaccgtcgatctcgtgatgcgggacgaagcgaggcgagaggcggtcagacagcgcggcttggccatcgcggagcagctggattgggaggggccgagcaagcaactgctcggtcactacgagcgagtcttgcagtcgttcagcgtcgtcgcgggcgccgtcaccggcacccgctga

SEQ ID NO: 16 - DNA, 1158 bp, Artificial
  Substituion in SEQ ID NO 2
gtgagcatgaggatcgcgatgtttacggagacgtttctgccgtcgaccgacgggatcgtcaccaggctctgtgcaacgctgaaatacttggagcgcgagggccacgaggtgctgctgttcgccccgtcgggatcgccggagacctacgcttccgcaaccatcgtcgggatccctgcgatgccgttcatcctgtatccagaaaagcgatactcgttgccgctgccgcgcatcggcaaacatctgcgggcgtttcggccggatctcatccacgtggtgaatccggcgttcctcggcatcgggggcatctactacgcgtggaagtctcatctgccgctggtggcctcgtatcacaccaacgtgccggcctacgctcgccactacaagctggagtttctcgagcccctgttgtggtggtactttcggacgctgcacaaccgggctcacctgaacctcgccacgtctcgcgcgacgctgcgagagctggagcgccaggggtttcagaatctggagctctgggagcgcggcgtggacgtggagctgttccgaaatgctccgtacagcgaggagatgcgccgccgcctggcgcccgaagcgaagccgggcgatcgcgtcctgctgtacgtggggcgcttggcgtcggaaaagaatatcgagcgcatgcgcccggtcctggacgccatcccggatctgcacctcgccatcgtcggcgacggcccgcaccgccctgaactcgagcgcgtgttcgccgggacgcggacccacttcaccggatacctccatggggaggagttggcgcaggcgtatcgcgccgcggacgccttcttgtttccgtcgaccactgagacgctcgggctggtcttgtttgaggcgatggcggccggccttcccatcgtggcggcggacagcccgcccacgcgcgaggtcctcgaggacggccgggcgggattcatcttcgatcccgattcgaccgagtccctcttagcgaccgtcgatctcgtgatgcgggacgaagcgaggcgagaggcggtcagacagcgcggcttggccatcgcggagcagctggattgggaggggccgagcaagcaactgctcggtcactacgagcgagtcttgcagtcgttcagcgtcgtcgcgggcgccgtcaccggcacccgctga

SEQ ID NO: 17 - DNA, 1158 bp, Artificial
  Substituion in SEQ ID NO 2
gtgagcatgaggatcgcgatgtttacggagacgtttctgccgtcgaccgacgggatcgtcaccaggctctgtgcaacgctgaaatacttggagcgcgagggccacgaggtgctgctgttcgccccgtcgggatcgccggagacctacgcttccgcaaccatcgtcgggatccctgcgatgccgttcatcctgtatccagaaaagcgatactcgttgccgctgccgcgcatcggcaaacatctgcgggcgtttcggccggatctcatccacgtggtgaatccggcgttcctcggcatcgggggcatctactacgcgtggaagtctcatctgccgctggtggcctcgtatcacaccaacgtgccggcctacgctcgccactacaagctggagtttctcgagcccctgttgtggtggtactttcggacgctgcacaaccgggctcacctgaacctcgccacgtctcgcgcgacgctgcgagagctggagcgccaggggtttcagaatctggagctctgggagcgcggcgtggacgtggagctgttccgaaatgctccgtacagcgatgagatgcgccgccgcctggcgcccgaagcgaagccgggcgatcgcgtcctgctgtacgtggggcgcttggcgtcggaaaagaatatcgagcgcatgcgcccggtcctggacgccatcccggatctgcacctcgccatcgtcggcgacggcccgcaccgccctgaactcgagcgcgtgttcgccgggacgcggacccacttcaccggatacctccatggggaggagttggcgcaggcgtatcgcgccgcggacgccttcttgtttccgtcgaccactgagacgctcgggctggtcttgtttgaggcgatggcggccggccttcccatcgtggcggcggacagcccgcccacgcgcgaggtcctcgaggacggccgggcgggattcatcttcgatcccgattcgaccgagtccctcatcgcgaccgtcgatctcgtgatgcgggacgaagcgaggcgagaggcggtcagacagcgcggcttggccatcgcggagcagctggattgggaggggccgagcaagcaactgctcggtcactacgagcgagtcttgcagtcgttcagcgtcgtcgcgggcgccgtcaccggcacccgctga

SEQ ID NO: 18 - protein, 393 aa, Alicyclobacillus acidocaldarius
MCGGDTEFETFGGRRCEHMHGPVLFYDGLICLIALLNRLLWPRLNRDRENVGPKAETFTSGRWKNLAPVALLIPARNEAHQIRRCLEAIGTSTDSSLEIIALDDESTDDTWSVLKETKAEANQNLTLLRGTPRPQGWRGKNWACAQLADHAGDAEILIFIDADTRLEAGAVENIRSTMLARDIQLLSVLPRQEAHGLAALLVYLLPWSLMAHVPLFLGRWRRKALPIAIGQVLAFQRSAYQTLGGHAAVRSAIAEDLALARKAARMGMIGAFLDGADIASCTMYTSWVRAWRGFQKNWCYTVGHPLLSCLIWAWLTYAFTWLPMYGLAEACLGHLDLAALSQWPALLWIGVCSKRYLQMPIWVFVTAPISVALGFVLACDSWIHNARNTTIWS

SEQ ID NO: 19 - DNA, 1182 bp, Alicyclobacillus acidocaldarius
ttgtgtggtggggataccgagttcgaaacgttcggcggaaggaggtgtgaacacatgcatggaccggtgctattctacgatggcctgatttgcctcattgcgctgttgaaccgcctcctgtggccccgtttgaaccgggacagggaaaacgtcgggcccaaggcggaaaccttcacgagtggacggtggaagaatcttgcgcccgtcgccctcctgattccggcgcggaacgaagcgcaccagattcggcggtgcctcgaggccattggtacgagtaccgattcatcccttgaaattatcgcgctggacgatgagtccacggacgacacgtggagcgtgttgaaagagacgaaggccgaagcgaatcagaacctgacccttcttcgcggaaccccaaggccacagggatggcgagggaaaaactgggcatgcgctcaactggccgatcacgccggagacgccgaaatcctcattttcatcgacgcggacacgcgtctcgaagcaggcgccgtcgagaacatccgatccaccatgcttgcgcgagacatccaacttctttccgtcctgccacgccaagaagcacacggcctggccgccttgcttgtctatttgctcccttggagcttgatggcccacgttcccttgtttctgggccgatggcgtcggaaagccctcccgattgccatcggccaggtgctcgccttccagcgctcggcctatcagacccttggcggccacgcggctgtacgcagcgccatcgctgaggatctcgcgctcgcgcggaaagcagccaggatgggaatgataggcgcctttctagatggggccgatatcgcctcctgcaccatgtacacgtcctgggtccgggcgtggcgcggcttccagaaaaactggtgttacaccgtcggccaccccctgctttcgtgtctcatctgggcgtggctcacgtatgcgttcacatggctacccatgtacggccttgcggaagcctgcctgggacatctcgatctcgccgccctctcgcaatggcccgcgctgctctggataggagtctgctccaaaagatacctgcagatgccgatatgggtgtttgtcacggcgcccatcagtgttgccctcggctttgtgctcgcatgcgattcgtggatacacaatgcgcgcaacacgaccatttggtcgtag

SEQ ID NO: 20 - protein, 294 aa, Pelodictyon phaeoclathratiforme BU-1
VSVLVPARNEALNIERCVRSLMRQEYAPFEILVLDDDSTDATPELLRRLVVESGGKVRIVQGEALPDGWHGKSWACSQLGHQAKGELLLFTDADTTHKPDALRRTVGAMQASGADMLSLMPHQELGSFWEKLVVPLVHVILMCYLPLRFVRTSRRAAFCFANGQFILFRRECYTRINGHAAVREAIVEDVWLCKSVKKAGGTVVAFNGSDIVSCRMYHNFREIWEGFSKNLFAALGYSTPGLFVLILMISALYLVPCLFFSYALIAGEFTVSLFWLPLMQMMVALLCRIFIARI

SEQ ID NO: 21 - protein, 317 aa, Chlorobium ferrooxidans DSM 13031
VSVLVPARNEALNIERCVRSLLMQDYAAFEILVLDDGSTDATPQLLQTLLDESGGRLRVLQGEPLPDGWHGKAWACLQLSRQAKGDLLLFTDADTKHEPDALRRSVAALNSEKGDMLSLTPRQELGSLWEELVVPLVYVILLCYLPLRLVRTSRNPAFCFANGQFILFRREFYDRINGHTAVRQALAEDIGLCREVKRAGGRVVAFNGFDAVSCRMYRSFRDIWEGFSKNLYASLGYSTPGLFLLMTLTAAFYIAPYLFFFYALIAGKFTMLLFWLPLTQMVIALLSRVIIARLFGQSTAMVFLNLFSQLILIAIAW

SEQ ID NO: 22 - protein, 320 aa, Chlorobium chlorochromatii CaD3
VSILVPARNEAHNIERCINSLLQQRYESFEVLVLDDGSTDATPTLLAELAQHAGGVLQVLQGDPLPQGWHGKAWACQQLGEAAHGDLLLFTDADTVHHPTALARSVAALQASQASMLSMTPLQTMHSWWEKIVVPLVYVVLMNFLPLRFVRTTSIPAFSFANGQFILIERTMYRQLNGHAAVRQQLVEDVWLCMAVKKAGGRVVAINGVDLVSCRMYRSGKEVWEGFSKNIFAGLGYYHSALFGLLALIALFYIIPIALLTTSVVQANYSATHFWLPLVQVVLAFANRWLVAFTFHQSRFMVFFHPLTMVAFFAIACNSW

SEQ ID NO: 23 - protein, 271 aa, Chlorobium limicola DSM 245
VSVLVPVRNEEHVIEACVLSLLAQDYPRYEVVVLDDCSEDRSLEILRRLEAASGSRLRIVQGKPLPEGWHGKAWACRQLGDLGGGELLLFTDADTRHKPEGISRSVAALYESGADMLTLTPYQEMAGFLEKLVIPLVYFILMCYLPLRFVRTSPKSVFCSAIGQFMLFRREIYRNIGGHRAVKAAIVEDVWLCREVKKAGGRVAVYNGIDALSCRMYRSPGEIIRGFSKNLFAGLGYRSFGLFSLVVLTLAFHVLPYGFLTAALLSGDFSA

SEQ ID NO: 24 - protein, 319 aa, Pelodictyon luteolum DSM 273
VSVLVPARNEERSIARCVQSLLMQDYPDFEVIVLDDASTDATLSILQALEAESCGRLRVLRGAVLPEGWHGKSWACRQLAEKASGEMLLFTDADTFHRPQALRRAVTALQEGRGDMLSITPRQELGSFFEHLVVPLVYVILMSYLPLRLVRTLRNPAFCFANGQFILFRREFYWKVNGHEAVRDALVEDVWLCMAVKKAGGRVLSFNGTDALSCRMYRNFREVWEGFSKNVFAGLGSSIPGLAAFVLFTAAFHLAPWGFLLYALFVGASGPALVLLPLLQLAVALSGRVLVARRFDQPTALTLLDPLARGLLLAIALNS

SEQ ID NO: 25 - protein, 393 aa, Artificial
  Substituion in SEQ ID NO 18
MCGGDTEFETFGGRRCEHMHGPVLFYDGLICLIALLNRLLWPRLNRDRENVGPRAETFTSGRWKNLAPVALLIPARNEAHQIRRCLEAIGTSTDSSLEIIALDDESTDDTWSVLKETKAEANQNLTLLRGTPRPQGWRGKNWACAQLADHAGDAEILIFIDADTRLEAGAVENIRSTMLARDIQLLSVLPRQEAHGLAALLVYLLPWSLMAHVPLFLGRWRRKALPIAIGQVLAFQRSAYQTLGGHAAVRSAIAEDLALARKAARMGMIGAFLDGADIASCTMYTSWVRAWRGFQKNWCYTVGHPLLSCLIWAWLTYAFTWLPMYGLAEACLGHLDLAALSQWPALLWIGVCSKRYLQMPIWVFVTAPISVALGFVLACDSWIHNARNTTIWS

SEQ ID NO: 26 - protein, 393 aa, Artificial
  Substituion in SEQ ID NO 18
MCGGDTEFETFGGRRCEHMHGPVLFYDGLICLIALLNRLLWPRLNRDRENVGPKAETFTSGRWKNLAPVALLIPARNEAHNIRRCLEAIGTSTDSSLEIIALDDESTDDTWSVLKETKAEANQNLTLLRGTPRPQGWRGKNWACAQLADHAGDAEILIFIDADTRLEAGAVENIRSTMLARDIQLLSVLPRQEAHGLAALLVYLLPWSLMAHVPLFLGRWRRKALPIAIGQVLAFQRSAYQTLGGHAAVRSAIAEDLALARKAARMGMIGAFLDGADIASCTMYTSWVRAWRGFQKNWCYTVGHPLLSCLIWAWLTYAFTWLPMYGLAEACLGHLDLAALSQWPALLWIGVCSKRYLQMPIWVFVTAPISVALGFVLACDSWIHNARNTTIWS

SEQ ID NO: 27 - protein, 393 aa, Artificial
  Substituion in SEQ ID NO 18
MCGGDTEFETFGGRRCEHMHGPVLFYDGLICLIALLNRLLWPRINRDRENVGPKAETFTSGRWKNLAPVALLIPARNEAHQIRRCLEAIGTSTDSSLEIIALDDESTDDTWSVLKETKAEANQNLTLLRGTPRPQGWRGKNWACAQLADHAGDAEILIFIDADTRLEAGAVENIRSTMLARDIQLLSVLPRQEAHGLAALLVYLLPWSLMAHVPLFLGRWRRKALPIAIGQVLAFQRSAYQTLGGHAAVRSAIAEDLALARKAARMGMIGAFLDGADIASCTMYTSWVRAWRGFQKNWCYTVGHPLLSCLIWAWLTYAFTWLPMYGLAEACLGHLDLAALSQWPALLWIGVCSKRYLQMPIWVFVTAPISVALGFVLACDSWIHNARNTTIWS

SEQ ID NO: 28 - protein, 393 aa, Artificial
  Substituion in SEQ ID NO 18
MCGGDTEFETFGGRRCEHMHGPVLFYDGLICLIALLNRLLWPRLNRDRENVGPKAETFTSGRWKNLAPVALLIPARNEAHQIRRCLEAIGTSTDSSLEIIALDDESTDDTWSVLKETKAEANQNLTLLRGTPRPQGWRGKNWACAQLADHAGDAEILIFIDADTRLEAGAVDNIRSTMLARDIQLLSVLPRQEAHGLAALLVYLLPWSLMAHVPLFLGRWRRKALPIAIGQVLAFQRSAYQTLGGHAAVRSAIAEDLALARKAARMGMIGAFLDGADIASCTMYTSWVRAWRGFQKNWCYTVGHPLLSCLIWAWLTYAFTWLPMYGLAEACLGHLDLAALSQWPALLWIGVCSKRYLQMPIWVFVTAPISVALGFVLACDSWIHNARNTTIWS

SEQ ID NO: 29 - protein, 393 aa, Artificial
  Substituion in SEQ ID NO 18
MCGGDTEFETFGGRRCEHMHGPVLFYDGLICLIALLNRLLWPRLNRDRENVGPKAETFTSGRWKNLAPVALLIPARNEAHQIRRCLEAIGTSTDSSLEIIALDDESTDDTWSVLKETKAEANQNLTLLRGTPRPQGWRGKNWACAQLADHAGDAEILIFIDADTRLEAGAVENIRSTMLARDIQLLSVLPRQDAHGLAALLVYLLPWSLMAHVPLFLGRWRRKALPIAIGQVLAFQRSAYQTLGGHAAVRSAIAEDLALARKAARMGMIGAFLDGADIASCTMYTSWVRAWRGFQKNWCYTVGHPLLSCLIWAWLTYAFTWLPMYGLAEACLGHLDLAALSQWPALLWIGVCSKRYLQMPIWVFVTAPISVALGFVLACDSWIHNARNTTIWS

SEQ ID NO: 30 - DNA, 1182 bp, Artificial
  Substituion in SEQ ID NO 19
ttgtgtggtggggataccgagttcgaaacgttcggcggaaggaggtgtgaacacatgcatggaccggtgctattctacgatggcctgatttgcctcattgcgctgttgaaccgcctcctgtggccccgtttgaaccgggacagggaaaacgtcgggccccgtgcggaaaccttcacgagtggacggtggaagaatcttgcgcccgtcgccctcctgattccggcgcggaacgaagcgcaccagattcggcggtgcctcgaggccattggtacgagtaccgattcatcccttgaaattatcgcgctggacgatgagtccacggacgacacgtggagcgtgttgaaagagacgaaggccgaagcgaatcagaacctgacccttcttcgcggaaccccaaggccacagggatggcgagggaaaaactgggcatgcgctcaactggccgatcacgccggagacgccgaaatcctcattttcatcgacgcggacacgcgtctcgaagcaggcgccgtcgagaacatccgatccaccatgcttgcgcgagacatccaacttctttccgtcctgccacgccaagaagcacacggcctggccgccttgcttgtctatttgctcccttggagcttgatggcccacgttcccttgtttctgggccgatggcgtcggaaagccctcccgattgccatcggccaggtgctcgccttccagcgctcggcctatcagacccttggcggccacgcggctgtacgcagcgccatcgctgaggatctcgcgctcgcgcggaaagcagccaggatgggaatgataggcgcctttctagatggggccgatatcgcctcctgcaccatgtacacgtcctgggtccgggcgtggcgcggcttccagaaaaactggtgttacaccgtcggccaccccctgctttcgtgtctcatctgggcgtggctcacgtatgcgttcacatggctacccatgtacggccttgcggaagcctgcctgggacatctcgatctcgccgccctctcgcaatggcccgcgctgctctggataggagtctgctccaaaagatacctgcagatgccgatatgggtgtttgtcacggcgcccatcagtgttgccctcggctttgtgctcgcatgcgattcgtggatacacaatgcgcgcaacacgaccatttggtcgtag

SEQ ID NO: 31 - DNA, 1182 bp, Artificial
  Substituion in SEQ ID NO 19
ttgtgtggtggggataccgagttcgaaacgttcggcggaaggaggtgtgaacacatgcatggaccggtgctattctacgatggcctgatttgcctcattgcgctgttgaaccgcctcctgtggccccgtttgaaccgggacagggaaaacgtcgggcccaaggcggaaaccttcacgagtggacggtggaagaatcttgcgcccgtcgccctcctgattccggcgcggaacgaagcgcacaatattcggcggtgcctcgaggccattggtacgagtaccgattcatcccttgaaattatcgcgctggacgatgagtccacggacgacacgtggagcgtgttgaaagagacgaaggccgaagcgaatcagaacctgacccttcttcgcggaaccccaaggccacagggatggcgagggaaaaactgggcatgcgctcaactggccgatcacgccggagacgccgaaatcctcattttcatcgacgcggacacgcgtctcgaagcaggcgccgtcgagaacatccgatccaccatgcttgcgcgagacatccaacttctttccgtcctgccacgccaagaagcacacggcctggccgccttgcttgtctatttgctcccttggagcttgatggcccacgttcccttgtttctgggccgatggcgtcggaaagccctcccgattgccatcggccaggtgctcgccttccagcgctcggcctatcagacccttggcggccacgcggctgtacgcagcgccatcgctgaggatctcgcgctcgcgcggaaagcagccaggatgggaatgataggcgcctttctagatggggccgatatcgcctcctgcaccatgtacacgtcctgggtccgggcgtggcgcggcttccagaaaaactggtgttacaccgtcggccaccccctgctttcgtgtctcatctgggcgtggctcacgtatgcgttcacatggctacccatgtacggccttgcggaagcctgcctgggacatctcgatctcgccgccctctcgcaatggcccgcgctgctctggataggagtctgctccaaaagatacctgcagatgccgatatgggtgtttgtcacggcgcccatcagtgttgccctcggctttgtgctcgcatgcgattcgtggatacacaatgcgcgcaacacgaccatttggtcgtag

SEQ ID NO: 32 - DNA, 1182 bp, Artificial
  Substituion in SEQ ID NO 19
ttgtgtggtggggataccgagttcgaaacgttcggcggaaggaggtgtgaacacatgcatggaccggtgctattctacgatggcctgatttgcctcattgcgctgttgaaccgcctcctgtggccccgtattaaccgggacagggaaaacgtcgggcccaaggcggaaaccttcacgagtggacggtggaagaatcttgcgcccgtcgccctcctgattccggcgcggaacgaagcgcaccagattcggcggtgcctcgaggccattggtacgagtaccgattcatcccttgaaattatcgcgctggacgatgagtccacggacgacacgtggagcgtgttgaaagagacgaaggccgaagcgaatcagaacctgacccttcttcgcggaaccccaaggccacagggatggcgagggaaaaactgggcatgcgctcaactggccgatcacgccggagacgccgaaatcctcattttcatcgacgcggacacgcgtctcgaagcaggcgccgtcgagaacatccgatccaccatgcttgcgcgagacatccaacttctttccgtcctgccacgccaagaagcacacggcctggccgccttgcttgtctatttgctcccttggagcttgatggcccacgttcccttgtttctgggccgatggcgtcggaaagccctcccgattgccatcggccaggtgctcgccttccagcgctcggcctatcagacccttggcggccacgcggctgtacgcagcgccatcgctgaggatctcgcgctcgcgcggaaagcagccaggatgggaatgataggcgcctttctagatggggccgatatcgcctcctgcaccatgtacacgtcctgggtccgggcgtggcgcggcttccagaaaaactggtgttacaccgtcggccaccccctgctttcgtgtctcatctgggcgtggctcacgtatgcgttcacatggctacccatgtacggccttgcggaagcctgcctgggacatctcgatctcgccgccctctcgcaatggcccgcgctgctctggataggagtctgctccaaaagatacctgcagatgccgatatgggtgtttgtcacggcgcccatcagtgttgccctcggctttgtgctcgcatgcgattcgtggatacacaatgcgcgcaacacgaccatttggtcgtag

SEQ ID NO: 33 - DNA, 1182 bp, Artificial
  Substituion in SEQ ID NO 19
ttgtgtggtggggataccgagttcgaaacgttcggcggaaggaggtgtgaacacatgcatggaccggtgctattctacgatggcctgatttgcctcattgcgctgttgaaccgcctcctgtggccccgtttgaaccgggacagggaaaacgtcgggcccaaggcggaaaccttcacgagtggacggtggaagaatcttgcgcccgtcgccctcctgattccggcgcggaacgaagcgcaccagattcggcggtgcctcgaggccattggtacgagtaccgattcatcccttgaaattatcgcgctggacgatgagtccacggacgacacgtggagcgtgttgaaagagacgaaggccgaagcgaatcagaacctgacccttcttcgcggaaccccaaggccacagggatggcgagggaaaaactgggcatgcgctcaactggccgatcacgccggagacgccgaaatcctcattttcatcgacgcggacacgcgtctcgaagcaggcgccgtcgataacatccgatccaccatgcttgcgcgagacatccaacttctttccgtcctgccacgccaagaagcacacggcctggccgccttgcttgtctatttgctcccttggagcttgatggcccacgttcccttgtttctgggccgatggcgtcggaaagccctcccgattgccatcggccaggtgctcgccttccagcgctcggcctatcagacccttggcggccacgcggctgtacgcagcgccatcgctgaggatctcgcgctcgcgcggaaagcagccaggatgggaatgataggcgcctttctagatggggccgatatcgcctcctgcaccatgtacacgtcctgggtccgggcgtggcgcggcttccagaaaaactggtgttacaccgtcggccaccccctgctttcgtgtctcatctgggcgtggctcacgtatgcgttcacatggctacccatgtacggccttgcggaagcctgcctgggacatctcgatctcgccgccctctcgcaatggcccgcgctgctctggataggagtctgctccaaaagatacctgcagatgccgatatgggtgtttgtcacggcgcccatcagtgttgccctcggctttgtgctcgcatgcgattcgtggatacacaatgcgcgcaacacgaccatttggtcgtag

SEQ ID NO: 34 - DNA, 1182 bp, Artificial
  Substituion in SEQ ID NO 19
ttgtgtggtggggataccgagttcgaaacgttcggcggaaggaggtgtgaacacatgcatggaccggtgctattctacgatggcctgatttgcctcattgcgctgttgaaccgcctcctgtggccccgtttgaaccgggacagggaaaacgtcgggcccaaggcggaaaccttcacgagtggacggtggaagaatcttgcgcccgtcgccctcctgattccggcgcggaacgaagcgcaccagattcggcggtgcctcgaggccattggtacgagtaccgattcatcccttgaaattatcgcgctggacgatgagtccacggacgacacgtggagcgtgttgaaagagacgaaggccgaagcgaatcagaacctgacccttcttcgcggaaccccaaggccacagggatggcgagggaaaaactgggcatgcgctcaactggccgatcacgccggagacgccgaaatcctcattttcatcgacgcggacacgcgtctcgaagcaggcgccgtcgagaacatccgatccaccatgcttgcgcgagacatccaacttctttccgtcctgccacgccaagatgcacacggcctggccgccttgcttgtctatttgctcccttggagcttgatggcccacgttcccttgtttctgggccgatggcgtcggaaagccctcccgattgccatcggccaggtgctcgccttccagcgctcggcctatcagacccttggcggccacgcggctgtacgcagcgccatcgctgaggatctcgcgctcgcgcggaaagcagccaggatgggaatgataggcgcctttctagatggggccgatatcgcctcctgcaccatgtacacgtcctgggtccgggcgtggcgcggcttccagaaaaactggtgttacaccgtcggccaccccctgctttcgtgtctcatctgggcgtggctcacgtatgcgttcacatggctacccatgtacggccttgcggaagcctgcctgggacatctcgatctcgccgccctctcgcaatggcccgcgctgctctggataggagtctgctccaaaagatacctgcagatgccgatatgggtgtttgtcacggcgcccatcagtgttgccctcggctttgtgctcgcatgcgattcgtggatacacaatgcgcgcaacacgaccatttggtcgtag

SEQ ID NO: 35 - protein, 384 aa, Alicyclobacillus acidocaldarius
MASERTVIVFFAGNEVGGAATHLATWAKALKGAQVDYRYRFVSLGDGPLADELRQMGMLHGAVAGTVGAIRDLARVLRRERAWILHSHGPRMNMLASFAASSAGAIWTATIHSHPRYDFEGHPLKAALFPSLHLWRLSRARGLFVVQPALGDALPCRTILEVPNAFFPRLPRASRDVCAAEWRRRLGLNPESRLIGIAARLDPVKQIDVAIAALALLSDLDVHLLVAGDGRDRIRLEAAAEDCGVRHRVHFLGHLQDVRDLYCAIDVHVLPSKSEGAPTSMLEAGYYGAANIGSDVPGIRRMLLDGEAGALVPSGDVQALAHAVRRLLTDTKARDAYVERFQRLVLPRYRPERMVVAYERGYTVIEEDAVRSGWRLPANSEQTR

SEQ ID NO: 36 - DNA, 1155 bp, Alicyclobacillus acidocaldarius
ttggcttcggagcgcaccgtgatcgtattttttgcgggaaacgaagtggggggcgctgcgacgcacctcgcgacctgggcgaaggcgctgaagggcgcgcaggtcgactaccgctaccgctttgtcagcttgggcgacggaccgcttgcggacgaactgcggcagatggggatgttgcacggcgcggtcgcagggacggttggcgccatacgcgatttggctcgtgtgctccgacgcgagcgcgcgtggattctccactcgcacggaccgcgcatgaatatgctcgcatcgttcgccgcatcgagtgcgggggccatctggaccgctacgattcacagccatcctcgatacgacttcgaggggcaccccttgaaagccgccttgtttcccagcctccatctgtggcgcctgtctcgtgcgcgcggcctgtttgtggttcagcccgcgctcggagacgcccttccctgccggaccatcctcgaggttcccaatgcgttttttccgcggctacccagggcttcgcgcgacgtgtgcgcagccgaatggcgacgtcggctgggcctgaacccagaatcgaggctgatcggcatcgcggcccggctcgatccggtcaaacagatcgacgtcgccatcgccgccctggcgcttctctcagacctggacgttcatctgcttgtcgcgggcgacgggcgagatcgtatccggttagaagcggcagcggaggactgcggcgtgcgccatcgggttcactttttggggcatttgcaggatgtgcgcgatttgtattgcgccatcgacgtccacgtgttgccctcgaagagcgaaggagctcccacctccatgttggaggccggttattacggggccgcgaacatcgggtcggacgtaccgggcattcggcggatgctgctcgacggagaggctggcgcgcttgtgccgtctggcgatgtgcaggcccttgctcatgcggtgcggcgacttctcacggacaccaaggcgcgggacgcctacgtggaacggtttcagcggctcgtgcttccgaggtataggccggaacgcatggtcgtcgcgtacgagcgcggctacacggtaatcgaggaagatgcggtgcgaagtggctggaggcttccggcgaactctgaacagacgaggtga

SEQ ID NO: 37 - protein, 359 aa, Geobacillus thermodenitrificans NG80-2
VLHVISGGETGGSRKHVVTLLSKFAPGTATLVVFQDGPLAAEARQAGIDVRLLAQSSRYDLSVLSKLVALIRRERFDILHTHGPRANLYGALIKRKIAIPWMTTVHSDPRLDFMKSGWKGKWFTRLNVWALQKVDYFFAVSERFKESLMELGIAAERIQTIYNGIDFDDAPRPHMLQRADLGLREDDLVIAMVARLHPIKGHALVFEALASLSDPDMKLLVVGDGPLASELREKATQSGIGRQVQFLGFRRDVADIYALSDVALMASYSESFPLALLEAANERLPVISTDVGGVSQLIASSDMGWIVPVGDRAALAQAMREARSRRHELKTMGKRLYEHASTHFSLQRLYEETMATYER

SEQ ID NO: 38 - protein, 367 aa, Bacteroides capillosus ATCC 29799
VIHLISGGDSGGAKTHVHMLLQNLSRTPGVEVTMVCFMEGPFSQEARELGISTVVLPGKNIFRTFHTLKNMIREGGYEIIHCHGARGNMMGALLRKATGLPVVTTVHSDYRLDYMGRPISRITYGTINTLALRLLDYRIGVSDAMTDLLISRGFDPDKLFTIYNGIDFTPRTPSMTRSEYLKSVGANWPEDCVVAGIAARLNPVKDIPTLIRGFAQARQSCPKLRLLIAGDGEQMNELKALAADLGVAEDVCFAGWVSDVDSFYGALDINTLTSLSETFPYSLTEGARAGLPTVASRVGGVPYLIDHGVNGLLFEAGDYETLAKHLTALASDETMRTHMGQRLYQKGKNDYSLESTLQRQLEIYSVI

SEQ ID NO: 39 - protein, 314 aa, Bacillus weihenstephanensis KBAB4
AGAEDGGGKTHIISLLDQFPDGEVELAVFEDGIVAKEARELGIKVHVFSQKSRYDLSILKNISEFINKEKFDVVHTHGPRANFFVSLMKKKFAAKWVTTIHSDPFQDFTKQGLKGWIFTKLNLKALKNIDLFFVVTNRLKKSLAALGISNEKMHVIYNGIEYDQEKADGYNKKEMFNIDEDVFTAIQVARLHPVKGHEVLFDALQQTKLEKIKVLLVGDGPLERELKALATEKGINDKVEFLGHRQDVKQLFASSHVNLLTSHSEGFPLVLLEAANQRVPSIVTRAGEIEPLIADETYGWIVPTGDGKALASAL

SEQ ID NO: 40 - protein, 316 aa, Bacillus cereus subsp. cytotoxis NVH 391-98
AGAEDGGGKTHIISLLDQFPTDEVELAVFEDGIVAREAREIGIKVHVFSQKSRYDLSILKNISRFINEEQFDIVHTHGPRANFYVSLMKKRIAAKWVTTIHSDPFQDFTKQGLKGWIFTKLNLKALKDIDLFFVVTNRLKKSLEQLGISSEKMRVIYNGIEYDKEKAQGYDKKEKFHIEEDVFTAIQVARLHPVKGHEVLFDALNNTSLTKIKVLLVGDGPLEEDLKALAKEKGIDDKVQFLGHRQDVKQLFASAHINLLTSHSEGFPLVLLEAANQRVPSIVTRAGEIEPLIVDDTYGWVVPVGDGKALANALEQ

SEQ ID NO: 41 - protein, 314 aa, Bacillus cereus ATCC 14579
AGAEDGGGKTHIISLLDQFPTGEVELAVFEDGIVAKEARELGIKVHVFSQKSRYDLSILKNISEFINKEKFDVVHTHGPRANFYVSLMKKRIKAKWVTTIHSDPFQDFTKQGLKGWIFTKLNLKALKNIDLFFVVTNRLKKSLAALGISNEKMHVIYNGIEYDKEKAEGYNKKEMFNIDEDVFTAIQVARLHPVKGHEVLFDALQQTKLEKIKVLLVGDGPLEENLKSLATEKGINDKVEFLGHRQDVKQLFASSHVNLLTSHSEGFPLVLLEAANQRVPSIVTRAGEIEPLIVDETYGWIVPTGDGKALALAL

SEQ ID NO: 42 - protein, 384 aa, Artificial
  Substituion in SEQ ID NO 35
MASERTVIVFFAGNEVGGAATHLATWAKALKGAQVDYRYRFVSLGDGPLADELRQMGMLHGAVAGTVGAIKDLARVLRRERAWILHSHGPRMNMLASFAASSAGAIWTATIHSHPRYDFEGHPLKAALFPSLHLWRLSRARGLFVVQPALGDALPCRTILEVPNAFFPRLPRASRDVCAAEWRRRLGLNPESRLIGIAARLDPVKQIDVAIAALALLSDLDVHLLVAGDGRDRIRLEAAAEDCGVRHRVHFLGHLQDVRDLYCAIDVHVLPSKSEGAPTSMLEAGYYGAANIGSDVPGIRRMLLDGEAGALVPSGDVQALAHAVRRLLTDTKARDAYVERFQRLVLPRYRPERMVVAYERGYTVIEEDAVRSGWRLPANSEQTR

SEQ ID NO: 43 - protein, 384 aa, Artificial
  Substituion in SEQ ID NO 35
MASERTVIVFFAGNEVGGAATHLATWAKALKGAQVDYRYRFVSLGDGPLADELRQMGMLHGAVAGTVGAIRDLARVLRRERAWILHSHGPRMNMLASFAASSAGAIWTATIHSHPRYDFEGHPLKAALFPSLHLWRLSRARGLFVVQPALGDALPCRTILEVPNAFFPRLPRASRDVCAAEWRRRLGLNPESRLIGIAARLDPVKQIDVAIAALALLSDLDVHLLVAGDGRDRIRLEAAADDCGVRHRVHFLGHLQDVRDLYCAIDVHVLPSKSEGAPTSMLEAGYYGAANIGSDVPGIRRMLLDGEAGALVPSGDVQALAHAVRRLLTDTKARDAYVERFQRLVLPRYRPERMVVAYERGYTVIEEDAVRSGWRLPANSEQTR

SEQ ID NO: 44 - protein, 384 aa, Artificial
  Substituion in SEQ ID NO 35
MASERTVIVFFAGNEVGGAATHLATWAKALKGAQVDYRYRFVSLGDGPLADELRQMGMLHGAVAGTVGAIRDLARVLRRERAWILHSHGPRMNMLASFAASSAGAIWTATIHSHPRYDFEGHPLKAALFPSLHLWRLSRARGLFVVQPALGDALPCRTILEVPNAFFPRLPRASRDVCAAEWRRRLGLNPESRLIGIAARLDPVKQIDVAIAALALLSDLDVHLLVAGDGRDRIRLEAAAEDCGVRHRVHFLGHLQDVRDLYCAIDVHVLPSKSEGAPTSMLEAGYYGAANIGSDVPGIRRMLLDGEAGALVPSGDVQALAHAVRRLLTDTKARDAYVERFQRLVLPRYRPERMVVAYERGYTVIEEEAVRSGWRLPANSEQTR

SEQ ID NO: 45 - protein, 384 aa, Artificial
  Substituion in SEQ ID NO 35
MASERTVIVFFAGNEVGGAATHLATWAKALKGAQVDYRYRFVSLGDGPLADELRQMGMLHGAVAGTVGAIRDLARVLRRERAWILHSHGPRMNMLASFAASSAGAIWTATIHSHPRYDFEGHPLKAALFPSLHLWRLSRARGLFVVQPALGDALPCRTILEVPNAFFPRLPRASRDVCAAEWRRRLGLNPESRLIGIAARLDPVKQIDIAIAALALLSDLDVHLLVAGDGRDRIRLEAAAEDCGVRHRVHFLGHLQDVRDLYCAIDVHVLPSKSEGAPTSMLEAGYYGAANIGSDVPGIRRMLLDGEAGALVPSGDVQALAHAVRRLLTDTKARDAYVERFQRLVLPRYRPERMVVAYERGYTVIEEDAVRSGWRLPANSEQTR

SEQ ID NO: 46 - protein, 384 aa, Artificial
  Substituion in SEQ ID NO 35
MASERTVIVFFAGNEVGGAATHLATWAKALKGAQVDYRYRFVSLGDGPLADELRQMGMLHGAVAGTVGAIRDLARVLRRERAWILHSHGPRMNMLASFAASSAGAIWTATIHSHPRYDFEGHPLKAALFPSLHLWRLSRARGLFVVQPALGDALPCRTIIEVPNAFFPRLPRASRDVCAAEWRRRLGLNPESRLIGIAARLDPVKQIDVAIAALALLSDLDVHLLVAGDGRDRIRLEAAAEDCGVRHRVHFLGHLQDVRDLYCAIDVHVLPSKSEGAPTSMLEAGYYGAANIGSDVPGIRRMLLDGEAGALVPSGDVQALAHAVRRLLTDTKARDAYVERFQRLVLPRYRPERMVVAYERGYTVIEEDAVRSGWRLPANSEQTR

SEQ ID NO: 47 - DNA, 1155 bp, Artificial
  Substituion in SEQ ID NO 36
ttggcttcggagcgcaccgtgatcgtattttttgcgggaaacgaagtggggggcgctgcgacgcacctcgcgacctgggcgaaggcgctgaagggcgcgcaggtcgactaccgctaccgctttgtcagcttgggcgacggaccgcttgcggacgaactgcggcagatggggatgttgcacggcgcggtcgcagggacggttggcgccataaaagatttggctcgtgtgctccgacgcgagcgcgcgtggattctccactcgcacggaccgcgcatgaatatgctcgcatcgttcgccgcatcgagtgcgggggccatctggaccgctacgattcacagccatcctcgatacgacttcgaggggcaccccttgaaagccgccttgtttcccagcctccatctgtggcgcctgtctcgtgcgcgcggcctgtttgtggttcagcccgcgctcggagacgcccttccctgccggaccatcctcgaggttcccaatgcgttttttccgcggctacccagggcttcgcgcgacgtgtgcgcagccgaatggcgacgtcggctgggcctgaacccagaatcgaggctgatcggcatcgcggcccggctcgatccggtcaaacagatcgacgtcgccatcgccgccctggcgcttctctcagacctggacgttcatctgcttgtcgcgggcgacgggcgagatcgtatccggttagaagcggcagcggaggactgcggcgtgcgccatcgggttcactttttggggcatttgcaggatgtgcgcgatttgtattgcgccatcgacgtccacgtgttgccctcgaagagcgaaggagctcccacctccatgttggaggccggttattacggggccgcgaacatcgggtcggacgtaccgggcattcggcggatgctgctcgacggagaggctggcgcgcttgtgccgtctggcgatgtgcaggcccttgctcatgcggtgcggcgacttctcacggacaccaaggcgcgggacgcctacgtggaacggtttcagcggctcgtgcttccgaggtataggccggaacgcatggtcgtcgcgtacgagcgcggctacacggtaatcgaggaagatgcggtgcgaagtggctggaggcttccggcgaactctgaacagacgaggtga

SEQ ID NO: 48 - DNA, 1155 bp, Artificial
  Substituion in SEQ ID NO 36
ttggcttcggagcgcaccgtgatcgtattttttgcgggaaacgaagtggggggcgctgcgacgcacctcgcgacctgggcgaaggcgctgaagggcgcgcaggtcgactaccgctaccgctttgtcagcttgggcgacggaccgcttgcggacgaactgcggcagatggggatgttgcacggcgcggtcgcagggacggttggcgccatacgcgatttggctcgtgtgctccgacgcgagcgcgcgtggattctccactcgcacggaccgcgcatgaatatgctcgcatcgttcgccgcatcgagtgcgggggccatctggaccgctacgattcacagccatcctcgatacgacttcgaggggcaccccttgaaagccgccttgtttcccagcctccatctgtggcgcctgtctcgtgcgcgcggcctgtttgtggttcagcccgcgctcggagacgcccttccctgccggaccatcctcgaggttcccaatgcgttttttccgcggctacccagggcttcgcgcgacgtgtgcgcagccgaatggcgacgtcggctgggcctgaacccagaatcgaggctgatcggcatcgcggcccggctcgatccggtcaaacagatcgacgtcgccatcgccgccctggcgcttctctcagacctggacgttcatctgcttgtcgcgggcgacgggcgagatcgtatccggttagaagcggcagcggatgactgcggcgtgcgccatcgggttcactttttggggcatttgcaggatgtgcgcgatttgtattgcgccatcgacgtccacgtgttgccctcgaagagcgaaggagctcccacctccatgttggaggccggttattacggggccgcgaacatcgggtcggacgtaccgggcattcggcggatgctgctcgacggagaggctggcgcgcttgtgccgtctggcgatgtgcaggcccttgctcatgcggtgcggcgacttctcacggacaccaaggcgcgggacgcctacgtggaacggtttcagcggctcgtgcttccgaggtataggccggaacgcatggtcgtcgcgtacgagcgcggctacacggtaatcgaggaagatgcggtgcgaagtggctggaggcttccggcgaactctgaacagacgaggtga

SEQ ID NO: 49 - DNA, 1155 bp, Artificial
  Substituion in SEQ ID NO 36
ttggcttcggagcgcaccgtgatcgtattttttgcgggaaacgaagtggggggcgctgcgacgcacctcgcgacctgggcgaaggcgctgaagggcgcgcaggtcgactaccgctaccgctttgtcagcttgggcgacggaccgcttgcggacgaactgcggcagatggggatgttgcacggcgcggtcgcagggacggttggcgccatacgcgatttggctcgtgtgctccgacgcgagcgcgcgtggattctccactcgcacggaccgcgcatgaatatgctcgcatcgttcgccgcatcgagtgcgggggccatctggaccgctacgattcacagccatcctcgatacgacttcgaggggcaccccttgaaagccgccttgtttcccagcctccatctgtggcgcctgtctcgtgcgcgcggcctgtttgtggttcagcccgcgctcggagacgcccttccctgccggaccatcctcgaggttcccaatgcgttttttccgcggctacccagggcttcgcgcgacgtgtgcgcagccgaatggcgacgtcggctgggcctgaacccagaatcgaggctgatcggcatcgcggcccggctcgatccggtcaaacagatcgacgtcgccatcgccgccctggcgcttctctcagacctggacgttcatctgcttgtcgcgggcgacgggcgagatcgtatccggttagaagcggcagcggaggactgcggcgtgcgccatcgggttcactttttggggcatttgcaggatgtgcgcgatttgtattgcgccatcgacgtccacgtgttgccctcgaagagcgaaggagctcccacctccatgttggaggccggttattacggggccgcgaacatcgggtcggacgtaccgggcattcggcggatgctgctcgacggagaggctggcgcgcttgtgccgtctggcgatgtgcaggcccttgctcatgcggtgcggcgacttctcacggacaccaaggcgcgggacgcctacgtggaacggtttcagcggctcgtgcttccgaggtataggccggaacgcatggtcgtcgcgtacgagcgcggctacacggtaatcgaggaagaagcggtgcgaagtggctggaggcttccggcgaactctgaacagacgaggtga

SEQ ID NO: 50 - DNA, 1155 bp, Artificial
  Substituion in SEQ ID NO 36
ttggcttcggagcgcaccgtgatcgtattttttgcgggaaacgaagtggggggcgctgcgacgcacctcgcgacctgggcgaaggcgctgaagggcgcgcaggtcgactaccgctaccgctttgtcagcttgggcgacggaccgcttgcggacgaactgcggcagatggggatgttgcacggcgcggtcgcagggacggttggcgccatacgcgatttggctcgtgtgctccgacgcgagcgcgcgtggattctccactcgcacggaccgcgcatgaatatgctcgcatcgttcgccgcatcgagtgcgggggccatctggaccgctacgattcacagccatcctcgatacgacttcgaggggcaccccttgaaagccgccttgtttcccagcctccatctgtggcgcctgtctcgtgcgcgcggcctgtttgtggttcagcccgcgctcggagacgcccttccctgccggaccatcctcgaggttcccaatgcgttttttccgcggctacccagggcttcgcgcgacgtgtgcgcagccgaatggcgacgtcggctgggcctgaacccagaatcgaggctgatcggcatcgcggcccggctcgatccggtcaaacagatcgacattgccatcgccgccctggcgcttctctcagacctggacgttcatctgcttgtcgcgggcgacgggcgagatcgtatccggttagaagcggcagcggaggactgcggcgtgcgccatcgggttcactttttggggcatttgcaggatgtgcgcgatttgtattgcgccatcgacgtccacgtgttgccctcgaagagcgaaggagctcccacctccatgttggaggccggttattacggggccgcgaacatcgggtcggacgtaccgggcattcggcggatgctgctcgacggagaggctggcgcgcttgtgccgtctggcgatgtgcaggcccttgctcatgcggtgcggcgacttctcacggacaccaaggcgcgggacgcctacgtggaacggtttcagcggctcgtgcttccgaggtataggccggaacgcatggtcgtcgcgtacgagcgcggctacacggtaatcgaggaagatgcggtgcgaagtggctggaggcttccggcgaactctgaacagacgaggtga

SEQ ID NO: 51 - DNA, 1155 bp, Artificial
  Substituion in SEQ ID NO 36
ttggcttcggagcgcaccgtgatcgtattttttgcgggaaacgaagtggggggcgctgcgacgcacctcgcgacctgggcgaaggcgctgaagggcgcgcaggtcgactaccgctaccgctttgtcagcttgggcgacggaccgcttgcggacgaactgcggcagatggggatgttgcacggcgcggtcgcagggacggttggcgccatacgcgatttggctcgtgtgctccgacgcgagcgcgcgtggattctccactcgcacggaccgcgcatgaatatgctcgcatcgttcgccgcatcgagtgcgggggccatctggaccgctacgattcacagccatcctcgatacgacttcgaggggcaccccttgaaagccgccttgtttcccagcctccatctgtggcgcctgtctcgtgcgcgcggcctgtttgtggttcagcccgcgctcggagacgcccttccctgccggaccatcattgaggttcccaatgcgttttttccgcggctacccagggcttcgcgcgacgtgtgcgcagccgaatggcgacgtcggctgggcctgaacccagaatcgaggctgatcggcatcgcggcccggctcgatccggtcaaacagatcgacgtcgccatcgccgccctggcgcttctctcagacctggacgttcatctgcttgtcgcgggcgacgggcgagatcgtatccggttagaagcggcagcggaggactgcggcgtgcgccatcgggttcactttttggggcatttgcaggatgtgcgcgatttgtattgcgccatcgacgtccacgtgttgccctcgaagagcgaaggagctcccacctccatgttggaggccggttattacggggccgcgaacatcgggtcggacgtaccgggcattcggcggatgctgctcgacggagaggctggcgcgcttgtgccgtctggcgatgtgcaggcccttgctcatgcggtgcggcgacttctcacggacaccaaggcgcgggacgcctacgtggaacggtttcagcggctcgtgcttccgaggtataggccggaacgcatggtcgtcgcgtacgagcgcggctacacggtaatcgaggaagatgcggtgcgaagtggctggaggcttccggcgaactctgaacagacgaggtga

SEQ ID NO: 52 - protein, 384 aa, Alicyclobacillus acidocaldarius
MRVGISCYPTVGGSGAVATELGKALARRGHEVHFIVTDVPFRLGAFVEHVYIHQIEPITYPVLKTPPYDFALASLMARVADEYQLDVLHAHYALPFAVCAHLAREMAKHPIRVVTTLHGTDITVLAQDPSLKSIIKLGIERSDAVTAVSQSLVRDTARLFETDKPIRCIYNFVDPDVFRPGCGGELKRHFAPNGERVLLHISNFRPVKRLHDVIAVFERVARRMPAKLLLVGEGPDLGAAKRQVEEAGLGDRVHFLGRQDEVAPLFAAADLFLLPSESESFGLVALEAMSCGVPVVGSTAGGIPEVVVHGETGFLAPVGRVDDMADLACKLLQDEATYRAFSARARERAVRAFHVDEKVSEYEALYREVMAAERGEHAHPRPGA

SEQ ID NO: 53 - DNA, 1155 bp, Alicyclobacillus acidocaldarius
ttgcgcgtgggtatcagctgttatccgacggtgggcggatccggagcggtggccaccgagcttggcaaggcgctcgcgcggcggggacacgaggtgcacttcatcgtgaccgacgtgccgttccggctcggcgcgtttgtggaacacgtgtacattcaccaaatcgagcccatcacgtacccggtcctcaagaccccgccgtacgactttgcgctcgccagtctcatggcgcgcgtggccgatgaataccaactcgacgtgctgcacgcgcactacgcccttccgtttgcggtgtgtgcacacctggcgcgcgagatggcgaagcatcccatccgggtggtcaccaccttgcatggcacggacatcacggtgttggcccaggatccgagcctcaagtccatcatcaaactcggcatcgagcgcagcgacgcggtgacggccgtcagccagagcctggtccgggacacggcacgcttgttcgagacggacaaaccgattcgctgcatctacaacttcgtcgatcccgacgtgtttcggcccgggtgcggcggggaactgaagcgccacttcgcgccaaacggcgagcgcgttctgcttcacatctccaacttccgcccggtcaaacggcttcacgacgtgatcgccgtgtttgagcgcgtggcgagacgcatgccggcgaagctgctcctcgtcggcgaagggccggatctgggagcggccaaacgccaggtggaggaggcgggtctcggcgatcgcgtgcattttttggggcgccaggacgaggtggcgccgctttttgcggccgccgatctgttcctgctgccttccgaaagcgagagcttcggcctcgtcgcgctcgaggcgatgtcttgcggcgtgcccgttgtcggatcgacggccggcggcattccggaggtggttgtgcacggggagaccggctttctcgcgcccgtcggccgcgtcgacgacatggcggatctcgcctgtaagcttttgcaagacgaggccacgtaccgggcgttctccgcgcgagcccgcgagcgagccgtgcgagcgtttcatgtggatgagaaggtcagcgagtacgaggctttgtatcgcgaggtgatggcggctgaacgcggcgagcatgcgcatccccgccccggcgcgtga

SEQ ID NO: 54 - protein, 370 aa, Paenibacillus larvae subsp. larvae BRL-230010
LKIGITCYPSLGGSGVVATELGKLLAEQGHEVHFIAHSMPFRLGRFDKNVFYHEVEVSDYYVFKYPPYDLSLASKLAQVARMQELDLLHVHYAIPHAVCALLAKQMVGDHLKVVTTLHGTDITVLAQDASISNMIRFAINESDAVTAVSEDLIRETRQTLDIQKPIHKIYNFVDKRMYYPRPVEDLKREVTRPGEKLFIHISNFRPVKRVHDVVQIFARVHREIPSRLLLVGEGLELSRIVSEVRELGLQDFVEFWGKQDDVAQVISLADVMLLPSEKESFGLVALEAMACGVPTVGSNAGGIPELITHGETGFMAEVGDVDTMSKYTIRLLEDEELLKRVSEACVQRARKKFCNDSLRARYEQVYYEVL

SEQ ID NO: 55 - protein, 374 aa, Bacillus pumilus SAFR-032
LKVGITCYPSVGGSGIIATELGKRLAEKGHDVHFITSSIPFRLNKVYPNIYFHEVDVNQYAVFQYPPYDLALASKLAEVARREKLDIIHAHYAVPHAVCAYLAKQMTGHSVKVVTTLHGTDITVLGYDPSLKEVIRFAIESSDRVTAVSHSLAAQTYDLIKPNKKIETIHNFVDERVYLRDDHNVLKRHYGLLDHEKVVIHVSNFRKVKRVHDVIHVFKKISEQVNAKLLLIGDGPEKSVVCELVKKLGLTDRVLFLGKQEKVEELYSISDLKLLLSEKESFGLVLLEAMACGVPCIGTDVGGIPEVITHGETGFLVPLGDIDAAAKHAVSILKDKALHEQVSAAAQSSVQAHFSSEKIVSEYEELYLELIEGD

SEQ ID NO: 56 - protein, 371 aa, Bacillus sp. NRRL B-14911
LKIGITCYPTVGGSGVVATELGKLLAERGHEIHFISSSLPFRLNRMYHNIFYHQVEVSQYSVFQYPPYDIALASKMAEVINREKLDLMHVHYAVPHAVCAILAKQMSGRDVKIATTLHGTDITVLGYEPSLKDSIRFGIEKSDRVTAVSKSLISQTNELIHPEKEIQAVYNFIDHRVYQKTGSDHLKKEYGITEDEKTVIHVSNFRAVKRVQDVVKVFARIESEMPAKLLLVGDGPEMSNVCKLVKELGLKEKVLFLGKQDKVEELYSISDLMLLLSEKESFGLVALEAMACGVPCIGTNIGGIPEVISDGETGYICKLGDIGSMAEKAAGLLADADKHTSFSHRAVQTAREKFSAEQIVSEYERLYFDML

SEQ ID NO: 57 - protein, 375 aa, Bacillus cereus ATCC 14579
LKIGITCYPSVGGSGVVGTELGKQLAERGHEIHFITSGLPFRLNKVYPNIYFHEVTVNQYSVFQYPPYDLALASKMAEVAQRENLDILHVHYAIPHAICAYLAKQMIGERIKIVTTLHGTDITVLGSDPSLNNLIRFGIEQSDVVTAVSHSLINETHELVKPSKEIQTVYNFIDERVYFKRNMSQLKKEYGISESEKVLIHISNFRKVKRVQDVVQAFAKIVKEVDAKLLLVGDGPEFCTILQIVKNLHIEDRVLFLGKQDNVAELLAMSDLMLLLSEKESFGLVLLEAMACGVPCIGTRVGGIPEVIQHGETGYLCEVGDTTGVANQAIQLLKDEELHRNMGERARESVYEQFRSEKIVSQYETIYYDVLRDDK

SEQ ID NO: 58 - protein, 375 aa, Bacillus anthracis str. Ames
LKIGITCYPSVGGSGVVGTELGKQLAERGHEIHFITSGLPFRLNKVYPNIYFHEVTVNQYSVFQYPPYDLALASKMAEVAQRENLDILHVHYAIPHAICAYLAKQMIGERIKIVTTLHGTDITVLGSDPSLNNLIRFGIEQSDVVTAVSHSLINETHELVKPNKDIQTVYNFIDERVYFKRDMTQLKKEYGISESEKILIHISNFRKVKRVQDVVQAFAKIVTEVDAKLLLVGDGPEFCTILQLVKNLHIEDRVLFLGKQDNVAELLAMSDLMLLLSEKESFGLVLLEAMACGVPCIGTRVGGIPEVIQHGDTGYLCEVGDTTGVADQAIQLLKDEELHRNMGERARESVYEQFRSEKIVSQYETIYYDVLRDDK

SEQ ID NO: 59 - protein, 384 aa, Artificial
  Substituion in SEQ ID NO 52
MRVGISCYPTVGGSGAVATELGKALARRGHEVHFIVTDVPFRLGAFVEHVYIHQIEPITYPVLKTPPYDFALASLMARVADEYQLDVLHAHYALPFAVCAHLAREMAKHPIRVVTTLHGTDITVLAQDPSLKSIIKLGIERSDAVTAVSQSLVRDTARLFETDKPIRCIYNFVDPDVFRPGCGGDLKRHFAPNGERVLLHISNFRPVKRLHDVIAVFERVARRMPAKLLLVGEGPDLGAAKRQVEEAGLGDRVHFLGRQDEVAPLFAAADLFLLPSESESFGLVALEAMSCGVPVVGSTAGGIPEVVVHGETGFLAPVGRVDDMADLACKLLQDEATYRAFSARARERAVRAFHVDEKVSEYEALYREVMAAERGEHAHPRPGA

SEQ ID NO: 60 - protein, 384 aa, Artificial
  Substituion in SEQ ID NO 52
MRVGISCYPTVGGSGAVATELGKALARRGHEVHFIVTDVPFRLGAFVEHVYIHQIEPITYPVLKTPPYDFALASLMARVADEYQLDVLHAHYALPFAVCAHLAREMAKHPIRVVTTLHGTDITVLAQDPSLKSIIKLGIERSDAVTAVSQSLVRDTARLFETDKPIRCIYNFVDPDVFRPGCGGELKRHFAPNGERVLLHISNFRPVKRLHDVIAVFERVARRMPAKLLLVGEGPDLGAAKRQVEEAGLGDRVHFLGRQDEVAPLFAAADLFLLPSESESFGLVALEAMSCGVPVVGSTAGGIPEVVVHGETGFLAPVGRVDDMADLACKLLQDEATYRAFSARARERAIRAFHVDEKVSEYEALYREVMAAERGEHAHPRPGA

SEQ ID NO: 61 - protein, 384 aa, Artificial
  Substituion in SEQ ID NO 52
MRVGISCYPTVGGSGAVATELGKALARRGHEVHFIVTDVPFRLGAFVEHVYIHQIEPITYPVLKTPPYDFALASLMARVADEYQLDVLHAHYALPFAVCAHLAREMAKHPIRVVTTLHGTDITVLAQDPSLKSLIKLGIERSDAVTAVSQSLVRDTARLFETDKPIRCIYNFVDPDVFRPGCGGELKRHFAPNGERVLLHISNFRPVKRLHDVIAVFERVARRMPAKLLLVGEGPDLGAAKRQVEEAGLGDRVHFLGRQDEVAPLFAAADLFLLPSESESFGLVALEAMSCGVPVVGSTAGGIPEVVVHGETGFLAPVGRVDDMADLACKLLQDEATYRAFSARARERAVRAFHVDEKVSEYEALYREVMAAERGEHAHPRPGA

SEQ ID NO: 62 - protein, 384 aa, Artificial
  Substituion in SEQ ID NO 52
MRVGISCYPTVGGSGAVATELGKALARRGHEVHFIVTDVPFRLGAFVEHVYIHQIEPITYPVLKTPPYDFALASLMARVADEYQLDVLHAHYALPFAVCAHLAREMAKHPIRVVTTLHGTDITVLAQDPSLKSIIKLGIERSDAVTAVSQSLVRDTARLFETDKPIRCIYNFVDPDVFRPGCGGELKRHFAPNGERVLLHISNFRPVKRLHDVIAVFERVARRMPAKLLLVGEGPDLGAAKRQVEEAGLGDRVHFLGRQDEVAPLFAAADLFLLPSESESFGLVALEAMSCGVPVVGSTAGGIPEVVVHGETGFLAPVGRVDDMADLACKLLQDDATYRAFSARARERAVRAFHVDEKVSEYEALYREVMAAERGEHAHPRPGA

SEQ ID NO: 63 - protein, 384 aa, Artificial
  Substituion in SEQ ID NO 52
MRVGISCYPTVGGSGAVATELGKALARRGHEVHFIVTDVPFRLGAFVEHVYIHQIEPITYPVLKTPPYDFALASLMARVADEYQLDVLHAHYALPFAVCAHLAREMAKHPIRVVTTLHGTDITVLAQDPSLKSIIKLGIERSDAVTAVSQSLVRDTARIFETDKPIRCIYNFVDPDVFRPGCGGELKRHFAPNGERVLLHISNFRPVKRLHDVIAVFERVARRMPAKLLLVGEGPDLGAAKRQVEEAGLGDRVHFLGRQDEVAPLFAAADLFLLPSESESFGLVALEAMSCGVPVVGSTAGGIPEVVVHGETGFLAPVGRVDDMADLACKLLQDEATYRAFSARARERAVRAFHVDEKVSEYEALYREVMAAERGEHAHPRPGA

SEQ ID NO: 64 - DNA, 1155 bp, Artificial
  Substituion in SEQ ID NO 53
ttgcgcgtgggtatcagctgttatccgacggtgggcggatccggagcggtggccaccgagcttggcaaggcgctcgcgcggcggggacacgaggtgcacttcatcgtgaccgacgtgccgttccggctcggcgcgtttgtggaacacgtgtacattcaccaaatcgagcccatcacgtacccggtcctcaagaccccgccgtacgactttgcgctcgccagtctcatggcgcgcgtggccgatgaataccaactcgacgtgctgcacgcgcactacgcccttccgtttgcggtgtgtgcacacctggcgcgcgagatggcgaagcatcccatccgggtggtcaccaccttgcatggcacggacatcacggtgttggcccaggatccgagcctcaagtccatcatcaaactcggcatcgagcgcagcgacgcggtgacggccgtcagccagagcctggtccgggacacggcacgcttgttcgagacggacaaaccgattcgctgcatctacaacttcgtcgatcccgacgtgtttcggcccgggtgcggcggggatctgaagcgccacttcgcgccaaacggcgagcgcgttctgcttcacatctccaacttccgcccggtcaaacggcttcacgacgtgatcgccgtgtttgagcgcgtggcgagacgcatgccggcgaagctgctcctcgtcggcgaagggccggatctgggagcggccaaacgccaggtggaggaggcgggtctcggcgatcgcgtgcattttttggggcgccaggacgaggtggcgccgctttttgcggccgccgatctgttcctgctgccttccgaaagcgagagcttcggcctcgtcgcgctcgaggcgatgtcttgcggcgtgcccgttgtcggatcgacggccggcggcattccggaggtggttgtgcacggggagaccggctttctcgcgcccgtcggccgcgtcgacgacatggcggatctcgcctgtaagcttttgcaagacgaggccacgtaccgggcgttctccgcgcgagcccgcgagcgagccgtgcgagcgtttcatgtggatgagaaggtcagcgagtacgaggctttgtatcgcgaggtgatggcggctgaacgcggcgagcatgcgcatccccgccccggcgcgtga

SEQ ID NO: 65 - DNA, 1155 bp, Artificial
  Substituion in SEQ ID NO 53
ttgcgcgtgggtatcagctgttatccgacggtgggcggatccggagcggtggccaccgagcttggcaaggcgctcgcgcggcggggacacgaggtgcacttcatcgtgaccgacgtgccgttccggctcggcgcgtttgtggaacacgtgtacattcaccaaatcgagcccatcacgtacccggtcctcaagaccccgccgtacgactttgcgctcgccagtctcatggcgcgcgtggccgatgaataccaactcgacgtgctgcacgcgcactacgcccttccgtttgcggtgtgtgcacacctggcgcgcgagatggcgaagcatcccatccgggtggtcaccaccttgcatggcacggacatcacggtgttggcccaggatccgagcctcaagtccatcatcaaactcggcatcgagcgcagcgacgcggtgacggccgtcagccagagcctggtccgggacacggcacgcttgttcgagacggacaaaccgattcgctgcatctacaacttcgtcgatcccgacgtgtttcggcccgggtgcggcggggaactgaagcgccacttcgcgccaaacggcgagcgcgttctgcttcacatctccaacttccgcccggtcaaacggcttcacgacgtgatcgccgtgtttgagcgcgtggcgagacgcatgccggcgaagctgctcctcgtcggcgaagggccggatctgggagcggccaaacgccaggtggaggaggcgggtctcggcgatcgcgtgcattttttggggcgccaggacgaggtggcgccgctttttgcggccgccgatctgttcctgctgccttccgaaagcgagagcttcggcctcgtcgcgctcgaggcgatgtcttgcggcgtgcccgttgtcggatcgacggccggcggcattccggaggtggttgtgcacggggagaccggctttctcgcgcccgtcggccgcgtcgacgacatggcggatctcgcctgtaagcttttgcaagacgaggccacgtaccgggcgttctccgcgcgagcccgcgagcgagccattcgagcgtttcatgtggatgagaaggtcagcgagtacgaggctttgtatcgcgaggtgatggcggctgaacgcggcgagcatgcgcatccccgccccggcgcgtga

SEQ ID NO: 66 - DNA, 1155 bp, Artificial
  Substituion in SEQ ID NO 53
ttgcgcgtgggtatcagctgttatccgacggtgggcggatccggagcggtggccaccgagcttggcaaggcgctcgcgcggcggggacacgaggtgcacttcatcgtgaccgacgtgccgttccggctcggcgcgtttgtggaacacgtgtacattcaccaaatcgagcccatcacgtacccggtcctcaagaccccgccgtacgactttgcgctcgccagtctcatggcgcgcgtggccgatgaataccaactcgacgtgctgcacgcgcactacgcccttccgtttgcggtgtgtgcacacctggcgcgcgagatggcgaagcatcccatccgggtggtcaccaccttgcatggcacggacatcacggtgttggcccaggatccgagcctcaagtccttaatcaaactcggcatcgagcgcagcgacgcggtgacggccgtcagccagagcctggtccgggacacggcacgcttgttcgagacggacaaaccgattcgctgcatctacaacttcgtcgatcccgacgtgtttcggcccgggtgcggcggggaactgaagcgccacttcgcgccaaacggcgagcgcgttctgcttcacatctccaacttccgcccggtcaaacggcttcacgacgtgatcgccgtgtttgagcgcgtggcgagacgcatgccggcgaagctgctcctcgtcggcgaagggccggatctgggagcggccaaacgccaggtggaggaggcgggtctcggcgatcgcgtgcattttttggggcgccaggacgaggtggcgccgctttttgcggccgccgatctgttcctgctgccttccgaaagcgagagcttcggcctcgtcgcgctcgaggcgatgtcttgcggcgtgcccgttgtcggatcgacggccggcggcattccggaggtggttgtgcacggggagaccggctttctcgcgcccgtcggccgcgtcgacgacatggcggatctcgcctgtaagcttttgcaagacgaggccacgtaccgggcgttctccgcgcgagcccgcgagcgagccgtgcgagcgtttcatgtggatgagaaggtcagcgagtacgaggctttgtatcgcgaggtgatggcggctgaacgcggcgagcatgcgcatccccgccccggcgcgtga

SEQ ID NO: 67 - DNA, 1155 bp, Artificial
  Substituion in SEQ ID NO 53
ttgcgcgtgggtatcagctgttatccgacggtgggcggatccggagcggtggccaccgagcttggcaaggcgctcgcgcggcggggacacgaggtgcacttcatcgtgaccgacgtgccgttccggctcggcgcgtttgtggaacacgtgtacattcaccaaatcgagcccatcacgtacccggtcctcaagaccccgccgtacgactttgcgctcgccagtctcatggcgcgcgtggccgatgaataccaactcgacgtgctgcacgcgcactacgcccttccgtttgcggtgtgtgcacacctggcgcgcgagatggcgaagcatcccatccgggtggtcaccaccttgcatggcacggacatcacggtgttggcccaggatccgagcctcaagtccatcatcaaactcggcatcgagcgcagcgacgcggtgacggccgtcagccagagcctggtccgggacacggcacgcttgttcgagacggacaaaccgattcgctgcatctacaacttcgtcgatcccgacgtgtttcggcccgggtgcggcggggaactgaagcgccacttcgcgccaaacggcgagcgcgttctgcttcacatctccaacttccgcccggtcaaacggcttcacgacgtgatcgccgtgtttgagcgcgtggcgagacgcatgccggcgaagctgctcctcgtcggcgaagggccggatctgggagcggccaaacgccaggtggaggaggcgggtctcggcgatcgcgtgcattttttggggcgccaggacgaggtggcgccgctttttgcggccgccgatctgttcctgctgccttccgaaagcgagagcttcggcctcgtcgcgctcgaggcgatgtcttgcggcgtgcccgttgtcggatcgacggccggcggcattccggaggtggttgtgcacggggagaccggctttctcgcgcccgtcggccgcgtcgacgacatggcggatctcgcctgtaagcttttgcaagacgatgccacgtaccgggcgttctccgcgcgagcccgcgagcgagccgtgcgagcgtttcatgtggatgagaaggtcagcgagtacgaggctttgtatcgcgaggtgatggcggctgaacgcggcgagcatgcgcatccccgccccggcgcgtga

SEQ ID NO: 68 - DNA, 1155 bp, Artificial
  Substituion in SEQ ID NO 53
ttgcgcgtgggtatcagctgttatccgacggtgggcggatccggagcggtggccaccgagcttggcaaggcgctcgcgcggcggggacacgaggtgcacttcatcgtgaccgacgtgccgttccggctcggcgcgtttgtggaacacgtgtacattcaccaaatcgagcccatcacgtacccggtcctcaagaccccgccgtacgactttgcgctcgccagtctcatggcgcgcgtggccgatgaataccaactcgacgtgctgcacgcgcactacgcccttccgtttgcggtgtgtgcacacctggcgcgcgagatggcgaagcatcccatccgggtggtcaccaccttgcatggcacggacatcacggtgttggcccaggatccgagcctcaagtccatcatcaaactcggcatcgagcgcagcgacgcggtgacggccgtcagccagagcctggtccgggacacggcacgcattttcgagacggacaaaccgattcgctgcatctacaacttcgtcgatcccgacgtgtttcggcccgggtgcggcggggaactgaagcgccacttcgcgccaaacggcgagcgcgttctgcttcacatctccaacttccgcccggtcaaacggcttcacgacgtgatcgccgtgtttgagcgcgtggcgagacgcatgccggcgaagctgctcctcgtcggcgaagggccggatctgggagcggccaaacgccaggtggaggaggcgggtctcggcgatcgcgtgcattttttggggcgccaggacgaggtggcgccgctttttgcggccgccgatctgttcctgctgccttccgaaagcgagagcttcggcctcgtcgcgctcgaggcgatgtcttgcggcgtgcccgttgtcggatcgacggccggcggcattccggaggtggttgtgcacggggagaccggctttctcgcgcccgtcggccgcgtcgacgacatggcggatctcgcctgtaagcttttgcaagacgaggccacgtaccgggcgttctccgcgcgagcccgcgagcgagccgtgcgagcgtttcatgtggatgagaaggtcagcgagtacgaggctttgtatcgcgaggtgatggcggctgaacgcggcgagcatgcgcatccccgccccggcgcgtga

SEQ ID NO: 69 - protein, 398 aa, Alicyclobacillus acidocaldarius
MTALAWAAAVSLAAWIFLLFGRGFYWRTALSMNTARMAAEARAPRAWPAVWAVVPARNEADVLPRTLPTLLSQAYPGEFHVVLVDDHSTDGTAEVAERLASELRLAHRLRVVRADALPPGWAGKVWAMQNGLRHVPDDAAYVLFTDADISHSPTSVQALVARAERDGLDLVSLMVRLRAESAWEKLLIPAFVYFFAKLYPFAWVAHPRRRTAAAAGGCVLVRRRLLPTPPGLEAIRDAVIDDCALARLVADGGGRLWLGLGDDVVSVRAYGTLGEIWRMIARTAFVQLRFSTVLLLGTALGMLLLYAVPPAAAIAGLVGLLAGAPGSLAALCLGGLAYAILASTFVPMLRWYRLSPARSALLPLAGVLYTLMTLDSARRFWLRTGDHWKGRPYEMRRP

SEQ ID NO: 70 - DNA, 1197 bp, Alicyclobacillus acidocaldarius
atgacggcgctggcttgggccgcggccgtaagcctcgcggcgtggatcttcctgcttttcgggcgcggcttctattggcgcacggcgctctccatgaacaccgcaaggatggcggccgaggccagggcgccccgcgcgtggccggccgtgtgggccgtggtgcccgcgcgcaacgaggcggacgtcttgccgaggacgcttccgacgcttctctcgcaggcgtaccccggtgagttccacgtcgtgctcgtggacgatcacagcacagacggcacggcggaggtggccgagcgccttgcgtcggagcttaggctcgcgcatcgtctgcgcgtggtgcgcgcggatgcgcttccgcctgggtgggcgggcaaggtgtgggccatgcagaatggtctcaggcacgtgccggacgatgcggcgtacgtgctgttcacggacgcggacatctcgcattcaccgacgagcgtccaggccctcgtggcgcgggccgagcgagacgggttggacctcgtctcgctcatggttcggctcagggccgagagcgcatgggaaaagctcctcattccagcgttcgtctacttcttcgcgaagctgtacccgttcgcgtgggtcgctcaccctaggcgaaggaccgcggccgcggcgggcggatgcgtgctcgtcaggcgccgcctgttgcccacgcccccggggcttgaggccattcgcgacgccgtgatcgacgactgtgcgctcgctcggctcgtggcggatggcggcgggcgcctctggctcgggcttggcgacgacgtggtgagcgtgcgggcgtacggaaccctcggcgaaatctggcggatgattgcgcgcaccgcgttcgtgcagctgcggttctccaccgtgctcctcttgggcaccgccctcggcatgctcctcttgtacgccgtgccacccgctgccgcaatcgccggcctcgtgggtcttctggcgggcgcgccggggagcctcgccgctttgtgccttggcgggctcgcgtacgccatcctcgcctcgaccttcgtgccgatgctccggtggtaccgcctgtctccggcgcgatccgccctgcttcccttggccggcgtcctgtacaccctcatgaccctcgactccgccaggcggttctggctccgcacgggcgatcactggaagggtcggccgtacgaaatgcgccgcccgtga

SEQ ID NO: 71 - protein, 341 aa, Acaryochloris marina MBIC11017
NEAEVLPVSLRSLLQQTYPGPFKILLIDDQSTDQTREIAQQIATDLDRNHQLQVIQTAPLPPGWSGKLWAMHQGIEMVLAESTQPTYFLLTDADIQHEANSLLSLVTKAEQEDQDMVSLMVRLRCQSIWEQLLIPAFVFFFQKLYPFLWVNQPQKQMAAAAGGCILVRRQTLSTIGGIQVIRDALIDDCALAAAIKQTPNAQPNRNIWLGLTSATQSLRSYDTLDSIWSMVARTAFTQLNYSTLLLIGTVVGMFLIYMVPPISIMLGLYLESISITVTGLITWVLMTLAYLPTIRLYQLSPIWAVSLPLIALLYNLMTLDSARQHWQGKGGAWKGRVYPAR

SEQ ID NO: 72 - protein, 370 aa, Frankia alni ACN14a
LYLAVGHGFFWRTDQRLPARQAPPSWPSVAIIIPARDEADVLPVTLPTLLAQDYPGPVRLILVDDGSTDGTTEVARALAEQAARNGHTGVTAAVTASTEPPPGWTGKLWALRRGVDCAGDAEFLLLTDADIAHDPGSLTSLVASARTHGLDMVSQMAVLRAETVWERVIVPAFVYFFAMLYPFRWSNRPRSRVAAAAGGCSLVRREALLAAGGLAEVRGAVIDDVAIARIIKRSGGRTWLGLAEQVHSRRPYPRLADLWKMVSRSAYAQLRHSPLLLLGTVLGMSLVFVVPVVATIAGLAAGDGTTAILGAVAWVIMTLSYVPMIRYYRQPVPAALLLPGVAVLYLGMTLDSARLKWAGRGAAWKGRTYD

SEQ ID NO: 73 - protein, 371 aa, Burkholderia pseudomallei 406e
LVLLFGRGGFWRARAARRLPPDARGAAAAAGWPAVAAVVPARNEADVIGEAVRSLVEQAYEGAFHLIVVDDHSTDGTAEAARAAAAAVGCADRLTVLAAQPLPAGWSGKVWAQSQGIAAVRSLGLPADYLLLTDADIGHPPDAVAQLVTRAQAEQRDLVSLMVRLRCDSFWEKALIPAFVFFFAKLYPFSWINDPRNRTAGAAGGCMLVRRDALEEAGGIESIRGALIDDCSLAAQIKHRGAGRHPIRLDLADRSVSLRPYDSWRDIWNMIARTAFTQLRYSPVLLLGTLVGMTILYLVPPVAALAYGARAWPAWLAWASMCTAYAPMLSYYRRSPWWAPALPLVALFYVGATFASAVRYWRGKGGQWKAR

SEQ ID NO: 74 - protein, 371 aa, Burkholderia pseudomallei 1106a
LVLLFGRGGFWRARAARRLPPDARGAAAAAGWPAVATVVPARNEADVIGEAVRSLVEQAYEGAFHLIVVDDHSTDGTAEAARAAAAAVGCADRLTVLAAQPLPAGWSGKVWAQSQGIAAVRSLGLPADYLLLTDADIGHPPDAVAQLVTRAQAEQRDLVSLMVRLRCDSFWEKALIPAFVFFFAKLYPFSWINDPRNRTAGAAGGCMLVRRDALEEAGGIESIRGALIDDCSLAAQIKHRGAGRHPIRLDLADRSVSLRPYDSWRDIWNMIARTAFTQLRYSPVLLLGTLVGMTILYLVPPVAALAYGARAWPAWLAWASMCTAYAPMLSYYRRSPWWAPALPLVALFYVGATFASAVRYWRGKGGQWKAR

SEQ ID NO: 75 - protein, 371 aa, Burkholderia pseudomallei 1710b; identical to SEQ ID NO: 73

SEQ ID NO: 76 - protein, 398 aa, Artificial
  Substituion in SEQ ID NO 69
MTALAWAAAVSLAAWIFLLFGRGFYWRTALSMNTARMAAEARAPRAWPAVWAVVPARNEADVLPRTLPTLLSQAYPGEFHVVLVDDHSTDGTAEVAERLASELRLAHRLRVVRADALPPGWAGKVWAMQNGLRHVPDDAAYVLFTDADISHSPTSVQALVARAERDGLDLVSLMVRLRAESAWEKLLIPAFVYFFAKLYPFAWVAHPRKRTAAAAGGCVLVRRRLLPTPPGLEAIRDAVIDDCALARLVADGGGRLWLGLGDDVVSVRAYGTLGEIWRMIARTAFVQLRFSTVLLLGTALGMLLLYAVPPAAAIAGLVGLLAGAPGSLAALCLGGLAYAILASTFVPMLRWYRLSPARSALLPLAGVLYTLMTLDSARRFWLRTGDHWKGRPYEMRRP

SEQ ID NO: 77 - protein, 398 aa, Artificial
  Substituion in SEQ ID NO 69
MTALAWAAAVSLAAWIFLLFGRGFYWRTALSMNTARMAAEARAPRAWPAVWAVVPARNEADVLPRTLPTLLSQAYPGEFHVVLVDDHSTDGTAEVAERLASELRLAHRLRVVRADALPPGWAGKVWAMQNGLRHVPDDAAYVLFTDADISHSPTSVQALVARAERDGLDLVSLMVRLRAESAWEKLLIPAFVYFFAKLYPFAWVAHPRRRTAAAAGGCVLVRRRLLPTPPGLEAIRDAVIDDCALARLVADGGGRLWLGLGDDVVSVRAYGTLGEIWRMIARTAFVQLRFSTVLLLGTALGMLLLYAVPPAAAIAGLVGLLAGAPGSLAALCLGGLAYAILASTFVPMLRWYRLSPARSALLPLAGVLYTLMTLDSARRFWLRTGDHWKGRPYDMRRP

SEQ ID NO: 78 - protein, 398 aa, Artificial
  Substituion in SEQ ID NO 69
MTALAWAAAVSLAAWIFLLFGRGFYWRTALSMNTARMAAEARAPRAWPAVWAVVPARNEADVLPRTLPTLLSQAYPGEFHVVLVDDHSTDGTAEVAERLASELRLAHRLRVVRADALPPGWAGKVWAMQNGLRHVPDDAAYVLFTDADISHSPTSVQALVARAERDGLDLVSLMVRLRAESAWEKLLIPAFVYFFAKLYPFAWVAHPRRRTAAAAGGCVLVRRRLLPTPPGLEAIRDAVIDDCALARLVADGGGRIWLGLGDDVVSVRAYGTLGEIWRMIARTAFVQLRFSTVLLLGTALGMLLLYAVPPAAAIAGLVGLLAGAPGSLAALCLGGLAYAILASTFVPMLRWYRLSPARSALLPLAGVLYTLMTLDSARRFWLRTGDHWKGRPYEMRRP

SEQ ID NO: 79 - protein, 398 aa, Artificial
  Substituion in SEQ ID NO 69
MTALAWAAAVSLAAWIFLLFGRGFYWRTALSMNTARMAAEARAPRAWPAVWAVVPARNEADVLPRTLPTLLSQAYPGEFHVVLVDDHSTDGTAEVAERLASELRLAHRLRVVRADALPPGWAGKVWAMQNGLRHVPDEAAYVLFTDADISHSPTSVQALVARAERDGLDLVSLMVRLRAESAWEKLLIPAFVYFFAKLYPFAWVAHPRRRTAAAAGGCVLVRRRLLPTPPGLEAIRDAVIDDCALARLVADGGGRLWLGLGDDVVSVRAYGTLGEIWRMIARTAFVQLRFSTVLLLGTALGMLLLYAVPPAAAIAGLVGLLAGAPGSLAALCLGGLAYAILASTFVPMLRWYRLSPARSALLPLAGVLYTLMTLDSARRFWLRTGDHWKGRPYEMRRP

SEQ ID NO: 80 - protein, 398 aa, Artificial
  Substituion in SEQ ID NO 69
MTALAWAAAVSLAAWIFLLFGRGFYWRTALSMNTARMAAEARAPRAWPAVWAVVPARNEADVLPRTLPTLLSQAYPGEFHVVLVDDHSTDGTAEVAERLASELRLAHRLRVVRADALPPGWAGKVWAMQNGLRHVPDDAAYVLFTDADISHSPTSVQALVARAERDGLDLVSLMVRLRAESAWEKLLIPAFVYFFAKLYPFAWVAHPRRRTAAAAGGCVLVRRRLLPTPPGLEAIRDAVIDDCALARIVADGGGRLWLGLGDDVVSVRAYGTLGEIWRMIARTAFVQLRFSTVLLLGTALGMLLLYAVPPAAAIAGLVGLLAGAPGSLAALCLGGLAYAILASTFVPMLRWYRLSPARSALLPLAGVLYTLMTLDSARRFWLRTGDHWKGRPYEMRRP

SEQ ID NO: 81 - DNA, 1197 bp, Artificial
  Substituion in SEQ ID NO 70
atgacggcgctggcttgggccgcggccgtaagcctcgcggcgtggatcttcctgcttttcgggcgcggcttctattggcgcacggcgctctccatgaacaccgcaaggatggcggccgaggccagggcgccccgcgcgtggccggccgtgtgggccgtggtgcccgcgcgcaacgaggcggacgtcttgccgaggacgcttccgacgcttctctcgcaggcgtaccccggtgagttccacgtcgtgctcgtggacgatcacagcacagacggcacggcggaggtggccgagcgccttgcgtcggagcttaggctcgcgcatcgtctgcgcgtggtgcgcgcggatgcgcttccgcctgggtgggcgggcaaggtgtgggccatgcagaatggtctcaggcacgtgccggacgatgcggcgtacgtgctgttcacggacgcggacatctcgcattcaccgacgagcgtccaggccctcgtggcgcgggccgagcgagacgggttggacctcgtctcgctcatggttcggctcagggccgagagcgcatgggaaaagctcctcattccagcgttcgtctacttcttcgcgaagctgtacccgttcgcgtgggtcgctcaccctaggaaaaggaccgcggccgcggcgggcggatgcgtgctcgtcaggcgccgcctgttgcccacgcccccggggcttgaggccattcgcgacgccgtgatcgacgactgtgcgctcgctcggctcgtggcggatggcggcgggcgcctctggctcgggcttggcgacgacgtggtgagcgtgcgggcgtacggaaccctcggcgaaatctggcggatgattgcgcgcaccgcgttcgtgcagctgcggttctccaccgtgctcctcttgggcaccgccctcggcatgctcctcttgtacgccgtgccacccgctgccgcaatcgccggcctcgtgggtcttctggcgggcgcgccggggagcctcgccgctttgtgccttggcgggctcgcgtacgccatcctcgcctcgaccttcgtgccgatgctccggtggtaccgcctgtctccggcgcgatccgccctgcttcccttggccggcgtcctgtacaccctcatgaccctcgactccgccaggcggttctggctccgcacgggcgatcactggaagggtcggccgtacgaaatgcgccgcccgtga

SEQ ID NO: 82 - DNA, 1197 bp, Artificial
  Substituion in SEQ ID NO 70
atgacggcgctggcttgggccgcggccgtaagcctcgcggcgtggatcttcctgcttttcgggcgcggcttctattggcgcacggcgctctccatgaacaccgcaaggatggcggccgaggccagggcgccccgcgcgtggccggccgtgtgggccgtggtgcccgcgcgcaacgaggcggacgtcttgccgaggacgcttccgacgcttctctcgcaggcgtaccccggtgagttccacgtcgtgctcgtggacgatcacagcacagacggcacggcggaggtggccgagcgccttgcgtcggagcttaggctcgcgcatcgtctgcgcgtggtgcgcgcggatgcgcttccgcctgggtgggcgggcaaggtgtgggccatgcagaatggtctcaggcacgtgccggacgatgcggcgtacgtgctgttcacggacgcggacatctcgcattcaccgacgagcgtccaggccctcgtggcgcgggccgagcgagacgggttggacctcgtctcgctcatggttcggctcagggccgagagcgcatgggaaaagctcctcattccagcgttcgtctacttcttcgcgaagctgtacccgttcgcgtgggtcgctcaccctaggcgaaggaccgcggccgcggcgggcggatgcgtgctcgtcaggcgccgcctgttgcccacgcccccggggcttgaggccattcgcgacgccgtgatcgacgactgtgcgctcgctcggctcgtggcggatggcggcgggcgcctctggctcgggcttggcgacgacgtggtgagcgtgcgggcgtacggaaccctcggcgaaatctggcggatgattgcgcgcaccgcgttcgtgcagctgcggttctccaccgtgctcctcttgggcaccgccctcggcatgctcctcttgtacgccgtgccacccgctgccgcaatcgccggcctcgtgggtcttctggcgggcgcgccggggagcctcgccgctttgtgccttggcgggctcgcgtacgccatcctcgcctcgaccttcgtgccgatgctccggtggtaccgcctgtctccggcgcgatccgccctgcttcccttggccggcgtcctgtacaccctcatgaccctcgactccgccaggcggttctggctccgcacgggcgatcactggaagggtcggccgtacgatatgcgccgcccgtga

SEQ ID NO: 83 - DNA, 1197 bp, Artificial
  Substituion in SEQ ID NO 70
atgacggcgctggcttgggccgcggccgtaagcctcgcggcgtggatcttcctgcttttcgggcgcggcttctattggcgcacggcgctctccatgaacaccgcaaggatggcggccgaggccagggcgccccgcgcgtggccggccgtgtgggccgtggtgcccgcgcgcaacgaggcggacgtcttgccgaggacgcttccgacgcttctctcgcaggcgtaccccggtgagttccacgtcgtgctcgtggacgatcacagcacagacggcacggcggaggtggccgagcgccttgcgtcggagcttaggctcgcgcatcgtctgcgcgtggtgcgcgcggatgcgcttccgcctgggtgggcgggcaaggtgtgggccatgcagaatggtctcaggcacgtgccggacgatgcggcgtacgtgctgttcacggacgcggacatctcgcattcaccgacgagcgtccaggccctcgtggcgcgggccgagcgagacgggttggacctcgtctcgctcatggttcggctcagggccgagagcgcatgggaaaagctcctcattccagcgttcgtctacttcttcgcgaagctgtacccgttcgcgtgggtcgctcaccctaggcgaaggaccgcggccgcggcgggcggatgcgtgctcgtcaggcgccgcctgttgcccacgcccccggggcttgaggccattcgcgacgccgtgatcgacgactgtgcgctcgctcggctcgtggcggatggcggcgggcgcatttggctcgggcttggcgacgacgtggtgagcgtgcgggcgtacggaaccctcggcgaaatctggcggatgattgcgcgcaccgcgttcgtgcagctgcggttctccaccgtgctcctcttgggcaccgccctcggcatgctcctcttgtacgccgtgccacccgctgccgcaatcgccggcctcgtgggtcttctggcgggcgcgccggggagcctcgccgctttgtgccttggcgggctcgcgtacgccatcctcgcctcgaccttcgtgccgatgctccggtggtaccgcctgtctccggcgcgatccgccctgcttcccttggccggcgtcctgtacaccctcatgaccctcgactccgccaggcggttctggctccgcacgggcgatcactggaagggtcggccgtacgaaatgcgccgcccgtga

SEQ ID NO: 84 - DNA, 1197 bp, Artificial
  Substituion in SEQ ID NO 70
atgacggcgctggcttgggccgcggccgtaagcctcgcggcgtggatcttcctgcttttcgggcgcggcttctattggcgcacggcgctctccatgaacaccgcaaggatggcggccgaggccagggcgccccgcgcgtggccggccgtgtgggccgtggtgcccgcgcgcaacgaggcggacgtcttgccgaggacgcttccgacgcttctctcgcaggcgtaccccggtgagttccacgtcgtgctcgtggacgatcacagcacagacggcacggcggaggtggccgagcgccttgcgtcggagcttaggctcgcgcatcgtctgcgcgtggtgcgcgcggatgcgcttccgcctgggtgggcgggcaaggtgtgggccatgcagaatggtctcaggcacgtgccggacgaagcggcgtacgtgctgttcacggacgcggacatctcgcattcaccgacgagcgtccaggccctcgtggcgcgggccgagcgagacgggttggacctcgtctcgctcatggttcggctcagggccgagagcgcatgggaaaagctcctcattccagcgttcgtctacttcttcgcgaagctgtacccgttcgcgtgggtcgctcaccctaggcgaaggaccgcggccgcggcgggcggatgcgtgctcgtcaggcgccgcctgttgcccacgcccccggggcttgaggccattcgcgacgccgtgatcgacgactgtgcgctcgctcggctcgtggcggatggcggcgggcgcctctggctcgggcttggcgacgacgtggtgagcgtgcgggcgtacggaaccctcggcgaaatctggcggatgattgcgcgcaccgcgttcgtgcagctgcggttctccaccgtgctcctcttgggcaccgccctcggcatgctcctcttgtacgccgtgccacccgctgccgcaatcgccggcctcgtgggtcttctggcgggcgcgccggggagcctcgccgctttgtgccttggcgggctcgcgtacgccatcctcgcctcgaccttcgtgccgatgctccggtggtaccgcctgtctccggcgcgatccgccctgcttcccttggccggcgtcctgtacaccctcatgaccctcgactccgccaggcggttctggctccgcacgggcgatcactggaagggtcggccgtacgaaatgcgccgcccgtga

SEQ ID NO: 85 - DNA, 1197 bp, Artificial
  Substituion in SEQ ID NO 70
atgacggcgctggcttgggccgcggccgtaagcctcgcggcgtggatcttcctgcttttcgggcgcggcttctattggcgcacggcgctctccatgaacaccgcaaggatggcggccgaggccagggcgccccgcgcgtggccggccgtgtgggccgtggtgcccgcgcgcaacgaggcggacgtcttgccgaggacgcttccgacgcttctctcgcaggcgtaccccggtgagttccacgtcgtgctcgtggacgatcacagcacagacggcacggcggaggtggccgagcgccttgcgtcggagcttaggctcgcgcatcgtctgcgcgtggtgcgcgcggatgcgcttccgcctgggtgggcgggcaaggtgtgggccatgcagaatggtctcaggcacgtgccggacgatgcggcgtacgtgctgttcacggacgcggacatctcgcattcaccgacgagcgtccaggccctcgtggcgcgggccgagcgagacgggttggacctcgtctcgctcatggttcggctcagggccgagagcgcatgggaaaagctcctcattccagcgttcgtctacttcttcgcgaagctgtacccgttcgcgtgggtcgctcaccctaggcgaaggaccgcggccgcggcgggcggatgcgtgctcgtcaggcgccgcctgttgcccacgcccccggggcttgaggccattcgcgacgccgtgatcgacgactgtgcgctcgctcggattgtggcggatggcggcgggcgcctctggctcgggcttggcgacgacgtggtgagcgtgcgggcgtacggaaccctcggcgaaatctggcggatgattgcgcgcaccgcgttcgtgcagctgcggttctccaccgtgctcctcttgggcaccgccctcggcatgctcctcttgtacgccgtgccacccgctgccgcaatcgccggcctcgtgggtcttctggcgggcgcgccggggagcctcgccgctttgtgccttggcgggctcgcgtacgccatcctcgcctcgaccttcgtgccgatgctccggtggtaccgcctgtctccggcgcgatccgccctgcttcccttggccggcgtcctgtacaccctcatgaccctcgactccgccaggcggttctggctccgcacgggcgatcactggaagggtcggccgtacgaaatgcgccgcccgtga

SEQ ID NO: 86 - protein, 526 aa, Alicyclobacillus acidocaldarius
MDPNGRFASWGRTPIDVRVVSKHVEIGFPRLPMMRYTFLGSSRRIAGGPMFRTYQELFRRIFIATDAAIVVVSFLLAWWLKFDSGWIPHAGHLPLLYYRGPLLIAVIVFVLANGVARLYEPMRAKSLFYEAYSVAKGVILGTIVLMAALYFAKMQEFSRDVIALFTGINFGLMVGERIVVRSVLRSLRRRGLNQRFLLIVGWSAATRRFLEALEAQPWFGYRVIGYLRYEGDDASRATVPCIGAVDDIRCVLEEHLVDQVVIAAPRDRVGDLAEVISACEAVGVQSLILPDYFDLLPARPRFETFGDVPLIDTRHVPLDDAVNAFLKRAFDIVFSLGVLIGLSPLLVAIAIAVKLSSPGPVLYVQERVGKNRRTFKMYKFRTMYWDPGADRAERDCAEEADLRSAGWTVKGDPRRTRVGAFLRRTSLDELPQFWNVLKGDMSVIGPRPERPVFVERFREEVPRYMVKHRVRPGITGWAQVHGWRGDTSIAERIRFDIEYIENWSFWLDLKIVWKTIKHGFVNENAY

SEQ ID NO: 87 - DNA, 1581 bp, Alicyclobacillus acidocaldarius
atggacccgaacggtaggtttgcaagttggggaagaacgcccatcgacgtaagggtggtgtcaaaacatgtcgaaataggcttccctcgcttgccaatgatgcgctatactttccttggtagttcacgccgcatcgcgggtggtcctatgtttcgcacttatcaggagctgttccggcgaatcttcatcgctaccgacgcggccatcgtcgtcgtgagttttctactcgcatggtggctcaagtttgattctgggtggattccgcacgccggccatctcccactcctctattatcgagggccgcttctcatcgccgtgatcgtattcgtgcttgcaaacggtgtagcgcggctctacgaaccgatgcgcgcgaagagcttgttctacgaggcgtacagcgtagcgaagggcgtcatcctcgggacaattgtcctcatggctgccctctatttcgcgaagatgcaggagttttcgcgagacgtcatcgcgctctttactggcatcaacttcgggctcatggtgggagagcggatcgtcgtgcgctccgtgctgcgcagcctgcgccgccgagggttgaatcagcgatttctcctcatcgtgggctggagtgcagcgacgcgtcgcttcctcgaggccctggaggcccagccgtggttcggttaccgtgtcataggctatctccgttacgaaggtgatgatgcgtcgcgcgcgacagtgccatgcatcggggcggttgacgacattcgttgcgtgcttgaggagcacctcgtcgatcaggtggtcatcgcggcaccgcgggatcgagtgggcgatctcgccgaagtgatttccgcctgcgaagctgtaggggtccagtcgctgatcttgccggattacttcgatctcctgccggccaggccccgttttgaaacctttggagatgtgccgctgattgacacgcgccatgtgccgctggacgatgcggtgaacgccttcctgaagcgcgcgttcgacatcgtgttcagtctgggggtcctgattggtctgtcgccgctgttggtggccattgcgattgcggtgaagctttcgtcgccagggccagtgctgtacgtgcaggagcgagtgggcaaaaatcgacggacatttaagatgtacaagttccgaacgatgtactgggatcccggggcggaccgtgcggagcgggattgcgcggaagaggcggacctgcggagcgctggttggacggtgaaaggcgatccgcggcggactcgcgtgggagcgttcctacgtcgcacgagtttggacgagctccctcagttctggaacgtgctgaagggagacatgagcgtcattgggccgcgcccggagcgccccgtcttcgtcgagcgattccgagaagaggtgccgcgttacatggtcaagcaccgcgtgagaccaggtatcaccgggtgggcgcaggtgcatggatggcgcggagatacttcgattgctgaacggattcgatttgacattgagtacatcgaaaactggtcattctggcttgatctcaagattgtgtggaagactatcaaacatgggtttgtgaatgagaatgcgtattga

SEQ ID NO: 88 - protein, 468 aa, Geobacillus stearothermophilus
VIRGRERFLTKLYAFVDFAMMQGAFFLAWVLKFKVFHNGVGGHLPLEDYLFWSFVYGAIAIVIGYLVELYAPKRKEKFSNELAKVLQVHTLSMFVLLSVLFTFKTVDVSRSFLLLYFAWNLILVSIYRYIVKQSLRTLRKKGYNKQFVLIIGAGSIGRKYFENLQMHPEFGLEVVGFLDDFRTKHAPEFAHYKPIIGQTADLEHVLSHQLIDEVIVALPLQAYPKYREIIAVCEKMGVRVSIIPDFYDILPAAPHFEIFGDLPIINVRDVPLDELRNRVLKRSFDIVFSLVAIIVTSPIMLLIAIGIKLTSPGPIIFKQERVGLNRRTFYMYKFRSMKPMPQSVSDTQWTVESDPRRTKFGAFLRKTSLDELPQFFNVLKGDMSIVGPRPERPFFVEKFKKEIPKYMIKHHVRPGITGWAQVCGLRGDTSIQERIEHDLFYIENWSLWLDIKIILLTITNGLVNKNAY

SEQ ID NO: 89 - protein, 459 aa, Geobacillus tepidamans
RGRERFLTKLYAFVDFAMMQGAFFLAWVLKFKVFHDGVGGHLPLEDYWFWSFVYGAIAIVIGYLVELYAPKRKEKFSNELAKVLQVHTLSMFILLSVLFTFKTVDVSRSFLLLYFAWNLTLASIYRYVVKQSLRKLRKKWYNKQFVLIIGAGSIGRKYFENLQMHPEYGLEVVGFLDDFRTKHAPEFAHYKPIIGQTADLEHVLSHQLIDEVIVALPLQAYPKYREIIAVCEKMGVRVSIIPDFYDMLPAVPHFEIFGDLPIINVRDVPLDELRNRILKRSFDVVFSLVAIIVTSPIMLLIAIGIKLTSPGPIIFKQERVGLNRRTFYMYKFRSMKHLPQSVSDTQWTVENDPRRTKFGAFLRKTSLDELPQFFNVLKGDMSVVGPRPERPYFVEKFKEEIPKYMIKHHVRPGITGWAQVCGLRGDTSIKARIEHDIFYIENWSLLFDIKIIFKTISNG

SEQ ID NO: 90 - protein, 463 aa, Desulfitobacterium hafniense DCB-2
MIRENQKTLNMIQVILDLAIVVIALALAYWLRFANYEGSHLKFESYVPTLVLLVPLHFFLYYLLGLYEARRRKSLSFEVGKIIQANFLSTMILFTLLYIIKEIHYSRQVLIYFVIFTGTLTIAERMALRAILNNIREKGYNKKHVLIIGTGRLAKRLVNALQENRYLGYEILGIVGENTAVGKKLAGVTVAGAISDLENIIMESKIDEIFITISTKDYDLFRNIIKICEKSGVRTQIVPDYARFIPAKPQMDEIEGIPLINIRHVPLDNFLKAFAKRVFDVAVSFVGLVVCLPLFLIIIIGIKLDSPGPIIFSQERVGLNKKNFMMYKFRTMKEQSIEESDKEWTTENDDRKTRLGNLLRKTSLDELPQLWNVFKGDMSLVGPRPERPFFVEQFKEKIPRYMVKHHVRPGITGWAQVNGWRGDTSIRKRIECDIYYIENWTFMFDLKILVMTVFKGFVNRNAY

SEQ ID NO: 91 - protein, 463 aa, Desulfitobacterium hafniense Y51
MIRENQKTLNMIQVILDLGIVVIALALAYWYRFSNYEGSYLKFESYVPTLVLLVPLHFFLYYLLGLYEARRRKSFSFEVGKIIQANLLSTMILFTLLYIIKEIDYSRQVLIYFIILTGTLTIAERVALRAILNNIREKGYNKKHVLIIGTGRLAKRLVNALQENRYLGYEILGIVGENTAVGKKLAGVTVAGAISDLENIIMESKIDEIFITISTKEYDLFRNIIKICEKSGVRTQIVPDYARFIPAKPQMDEVDGIPLINIRHVPLDNFLKSFAKRAFDVAVSFVGLIICLPIFLVIIIGIKLDSPGAVIFSQERVGLNKKNFMMYKFRTMRMQSAEESDKEWTTKEDNRKTRLGNILRKTSLDELPQLWNVFKGDMSLVGPRPERPFFVEQFKEKIPRYMIKHHVRPGITGWAQVNGWRGDTSIRKRIECDIYYIENWTFMFDLKILVMTVFKGFVNRNAY

SEQ ID NO: 92 - protein, 462 aa, Dorea formicigenerans ATCC 27755
QKLFNRLHVLIDALIIIFSYGAAWFIRFKSGLFALSSWYLSLSQYMKVLVFVVPIYLILYYAFQLYTPKRGQGRRIEAWHIVQANIIGLLVFILILYLAKMTDYSRKMLFVFFCVNVVAEIGFRNVLRWILRKYRKQGYNQKHILLVGYSRAAEGYLDRVVTHPEWGYIVKGILADNKPEGEEYRGIKILGGTDKLAEILPQNQLDEIVITLGLAEYHKLGRIVNMCEKSGVHTKFVPDYNNIIPTKPYTEDLMGMPVINIRRVPLNNMLNAVAKRCVDILGALVAIILFSPVMLVTSIIIKVTSPGPLIFKQERIGKHNRPFYMYKFRSMVVQDEKDEKKGWTTKNDPRVTPIGRFIRKTSIDELPQLFNILIGDMSLVGPRPERPQFVEKFKEEIPRYMIKHQVRPGLTGWAQVNGYRGDTSIQKRIEFDLYYIENWTMGFDFKIIFLTFFKGFINRNAY

SEQ ID NO: 93 - protein, 526 aa, Artificial
  Substituion in SEQ ID NO 86
MDPNGRFASWGRTPIDVRVVSKHVEIGFPRLPMMRYTFLGSSRRIAGGPMFRTYQELFRRIFIATDAAIVVVSFLLAWWLKFDSGWIPHAGHLPLLYYRGPLLIAVIVFVLANGVARLYEPMRAKSLFYEAYSVAKGVILGTIVLMAALYFAKMQEFSRDVIALFTGINFGLMVGERIVVRSVLRSLRRRGLNQRFLLIVGWSAATRRFLEALEAQPWFGYRVIGYLRYEGDDASRATVPCIGAVDDIKCVLEEHLVDQVVIAAPRDRVGDLAEVISACEAVGVQSLILPDYFDLLPARPRFETFGDVPLIDTRHVPLDDAVNAFLKRAFDIVFSLGVLIGLSPLLVAIAIAVKLSSPGPVLYVQERVGKNRRTFKMYKFRTMYWDPGADRAERDCAEEADLRSAGWTVKGDPRRTRVGAFLRRTSLDELPQFWNVLKGDMSVIGPRPERPVFVERFREEVPRYMVKHRVRPGITGWAQVHGWRGDTSIAERIRFDIEYIENWSFWLDLKIVWKTIKHGFVNENAY

SEQ ID NO: 94 - protein, 526 aa, Artificial
  Substituion in SEQ ID NO 86
MDPNGRFASWGRTPIDVRVVSKHVELGFPRLPMMRYTFLGSSRRIAGGPMFRTYQELFRRIFIATDAAIVVVSFLLAWWLKFDSGWIPHAGHLPLLYYRGPLLIAVIVFVLANGVARLYEPMRAKSLFYEAYSVAKGVILGTIVLMAALYFAKMQEFSRDVIALFTGINFGLMVGERIVVRSVLRSLRRRGLNQRFLLIVGWSAATRRFLEALEAQPWFGYRVIGYLRYEGDDASRATVPCIGAVDDIRCVLEEHLVDQVVIAAPRDRVGDLAEVISACEAVGVQSLILPDYFDLLPARPRFETFGDVPLIDTRHVPLDDAVNAFLKRAFDIVFSLGVLIGLSPLLVAIAIAVKLSSPGPVLYVQERVGKNRRTFKMYKFRTMYWDPGADRAERDCAEEADLRSAGWTVKGDPRRTRVGAFLRRTSLDELPQFWNVLKGDMSVIGPRPERPVFVERFREEVPRYMVKHRVRPGITGWAQVHGWRGDTSIAERIRFDIEYIENWSFWLDLKIVWKTIKHGFVNENAY

SEQ ID NO: 95 - protein, 526 aa, Artificial
  Substituion in SEQ ID NO 86
MDPNGRFASWGRTPIDVRVVSKHVEIGFPRLPMMRYTFLGSSRRIAGGPMFRTYQELFRRIFIATDAAIVVVSFLLAWWLKFDSGWIPHAGHLPLLYYRGPLLIAVIVFVLANGVARLYEPMRAKSLFYEAYSVAKGVILGTIVLMAALYFAKMQEFSRDVIALFTGINFGLMVGERIVVRSVLRSLRRRGLNQRFLLIVGWSAATRRFLEALEAQPWFGYRVIGYLRYEGDDASRATVPCIGAVEDIRCVLEEHLVDQVVIAAPRDRVGDLAEVISACEAVGVQSLILPDYFDLLPARPRFETFGDVPLIDTRHVPLDDAVNAFLKRAFDIVFSLGVLIGLSPLLVAIAIAVKLSSPGPVLYVQERVGKNRRTFKMYKFRTMYWDPGADRAERDCAEEADLRSAGWTVKGDPRRTRVGAFLRRTSLDELPQFWNVLKGDMSVIGPRPERPVFVERFREEVPRYMVKHRVRPGITGWAQVHGWRGDTSIAERIRFDIEYIENWSFWLDLKIVWKTIKHGFVNENAY

SEQ ID NO: 96 - protein, 526 aa, Artificial
  Substituion in SEQ ID NO 86
MDPNGRFASWGRTPIDVRVVSKHVEIGFPRLPMMRYTFLGSSRRIAGGPMFRTYQELFRRIFIATDAAIVVVSFLIAWWLKFDSGWIPHAGHLPLLYYRGPLLIAVIVFVLANGVARLYEPMRAKSLFYEAYSVAKGVILGTIVLMAALYFAKMQEFSRDVIALFTGINFGLMVGERIVVRSVLRSLRRRGLNQRFLLIVGWSAATRRFLEALEAQPWFGYRVIGYLRYEGDDASRATVPCIGAVDDIRCVLEEHLVDQVVIAAPRDRVGDLAEVISACEAVGVQSLILPDYFDLLPARPRFETFGDVPLIDTRHVPLDDAVNAFLKRAFDIVFSLGVLIGLSPLLVAIAIAVKLSSPGPVLYVQERVGKNRRTFKMYKFRTMYWDPGADRAERDCAEEADLRSAGWTVKGDPRRTRVGAFLRRTSLDELPQFWNVLKGDMSVIGPRPERPVFVERFREEVPRYMVKHRVRPGITGWAQVHGWRGDTSIAERIRFDIEYIENWSFWLDLKIVWKTIKHGFVNENAY

SEQ ID NO: 97 - protein, 526 aa, Artificial
  Substituion in SEQ ID NO 86
MDPNGRFASWGRTPIDVRVVSKHVEIGFPRLPMMRYTFLGSSRRIAGGPMFRTYQELFRRIFIATDAAIVVVSFLLAWWLKFDSGWIPHAGHLPLLYYRGPLLIAVIVFVLANGVARLYEPMRAKSLFYEAYSVAKGVILGTIVLMAALYFAKMQEFSRDVIALFTGINFGLMVGERIVVRSVLRSLRRRGLNQRFLLIVGWSAATRRFLEALEAQPWFGYRVIGYLRYEGDDASRATVPCIGAVDDIRCVLEEHLVDQVVIAAPRDRVGDLAEVISACEAVGVQSLILPDYFDLLPARPRFETFGDVPLIDTRHVPLDDAVNAFLKRAFDIVFSLGVLIGLSPLLVAIAIAVKLSSPGPVLYVQERVGKNRRTFKMYKFRTMYWDPGADRAERDCAEEADLKSAGWTVKGDPRRTRVGAFLRRTSLDELPQFWNVLKGDMSVIGPRPERPVFVERFREEVPRYMVKHRVRPGITGWAQVHGWRGDTSIAERIRFDIEYIENWSFWLDLKIVWKTIKHGFVNENAY

SEQ ID NO: 98 - DNA, 1581 bp, Artificial
  Substituion in SEQ ID NO 87
atggacccgaacggtaggtttgcaagttggggaagaacgcccatcgacgtaagggtggtgtcaaaacatgtcgaaataggcttccctcgcttgccaatgatgcgctatactttccttggtagttcacgccgcatcgcgggtggtcctatgtttcgcacttatcaggagctgttccggcgaatcttcatcgctaccgacgcggccatcgtcgtcgtgagttttctactcgcatggtggctcaagtttgattctgggtggattccgcacgccggccatctcccactcctctattatcgagggccgcttctcatcgccgtgatcgtattcgtgcttgcaaacggtgtagcgcggctctacgaaccgatgcgcgcgaagagcttgttctacgaggcgtacagcgtagcgaagggcgtcatcctcgggacaattgtcctcatggctgccctctatttcgcgaagatgcaggagttttcgcgagacgtcatcgcgctctttactggcatcaacttcgggctcatggtgggagagcggatcgtcgtgcgctccgtgctgcgcagcctgcgccgccgagggttgaatcagcgatttctcctcatcgtgggctggagtgcagcgacgcgtcgcttcctcgaggccctggaggcccagccgtggttcggttaccgtgtcataggctatctccgttacgaaggtgatgatgcgtcgcgcgcgacagtgccatgcatcggggcggttgacgacattaaatgcgtgcttgaggagcacctcgtcgatcaggtggtcatcgcggcaccgcgggatcgagtgggcgatctcgccgaagtgatttccgcctgcgaagctgtaggggtccagtcgctgatcttgccggattacttcgatctcctgccggccaggccccgttttgaaacctttggagatgtgccgctgattgacacgcgccatgtgccgctggacgatgcggtgaacgccttcctgaagcgcgcgttcgacatcgtgttcagtctgggggtcctgattggtctgtcgccgctgttggtggccattgcgattgcggtgaagctttcgtcgccagggccagtgctgtacgtgcaggagcgagtgggcaaaaatcgacggacatttaagatgtacaagttccgaacgatgtactgggatcccggggcggaccgtgcggagcgggattgcgcggaagaggcggacctgcggagcgctggttggacggtgaaaggcgatccgcggcggactcgcgtgggagcgttcctacgtcgcacgagtttggacgagctccctcagttctggaacgtgctgaagggagacatgagcgtcattgggccgcgcccggagcgccccgtcttcgtcgagcgattccgagaagaggtgccgcgttacatggtcaagcaccgcgtgagaccaggtatcaccgggtgggcgcaggtgcatggatggcgcggagatacttcgattgctgaacggattcgatttgacattgagtacatcgaaaactggtcattctggcttgatctcaagattgtgtggaagactatcaaacatgggtttgtgaatgagaatgcgtattga

SEQ ID NO: 99 - DNA, 1581 bp, Artificial
  Substituion in SEQ ID NO 87
atggacccgaacggtaggtttgcaagttggggaagaacgcccatcgacgtaagggtggtgtcaaaacatgtcgaattaggcttccctcgcttgccaatgatgcgctatactttccttggtagttcacgccgcatcgcgggtggtcctatgtttcgcacttatcaggagctgttccggcgaatcttcatcgctaccgacgcggccatcgtcgtcgtgagttttctactcgcatggtggctcaagtttgattctgggtggattccgcacgccggccatctcccactcctctattatcgagggccgcttctcatcgccgtgatcgtattcgtgcttgcaaacggtgtagcgcggctctacgaaccgatgcgcgcgaagagcttgttctacgaggcgtacagcgtagcgaagggcgtcatcctcgggacaattgtcctcatggctgccctctatttcgcgaagatgcaggagttttcgcgagacgtcatcgcgctctttactggcatcaacttcgggctcatggtgggagagcggatcgtcgtgcgctccgtgctgcgcagcctgcgccgccgagggttgaatcagcgatttctcctcatcgtgggctggagtgcagcgacgcgtcgcttcctcgaggccctggaggcccagccgtggttcggttaccgtgtcataggctatctccgttacgaaggtgatgatgcgtcgcgcgcgacagtgccatgcatcggggcggttgacgacattcgttgcgtgcttgaggagcacctcgtcgatcaggtggtcatcgcggcaccgcgggatcgagtgggcgatctcgccgaagtgatttccgcctgcgaagctgtaggggtccagtcgctgatcttgccggattacttcgatctcctgccggccaggccccgttttgaaacctttggagatgtgccgctgattgacacgcgccatgtgccgctggacgatgcggtgaacgccttcctgaagcgcgcgttcgacatcgtgttcagtctgggggtcctgattggtctgtcgccgctgttggtggccattgcgattgcggtgaagctttcgtcgccagggccagtgctgtacgtgcaggagcgagtgggcaaaaatcgacggacatttaagatgtacaagttccgaacgatgtactgggatcccggggcggaccgtgcggagcgggattgcgcggaagaggcggacctgcggagcgctggttggacggtgaaaggcgatccgcggcggactcgcgtgggagcgttcctacgtcgcacgagtttggacgagctccctcagttctggaacgtgctgaagggagacatgagcgtcattgggccgcgcccggagcgccccgtcttcgtcgagcgattccgagaagaggtgccgcgttacatggtcaagcaccgcgtgagaccaggtatcaccgggtgggcgcaggtgcatggatggcgcggagatacttcgattgctgaacggattcgatttgacattgagtacatcgaaaactggtcattctggcttgatctcaagattgtgtggaagactatcaaacatgggtttgtgaatgagaatgcgtattga

SEQ ID NO: 100 - DNA, 1581 bp, Artificial
  Substituion in SEQ ID NO 87
atggacccgaacggtaggtttgcaagttggggaagaacgcccatcgacgtaagggtggtgtcaaaacatgtcgaaataggcttccctcgcttgccaatgatgcgctatactttccttggtagttcacgccgcatcgcgggtggtcctatgtttcgcacttatcaggagctgttccggcgaatcttcatcgctaccgacgcggccatcgtcgtcgtgagttttctactcgcatggtggctcaagtttgattctgggtggattccgcacgccggccatctcccactcctctattatcgagggccgcttctcatcgccgtgatcgtattcgtgcttgcaaacggtgtagcgcggctctacgaaccgatgcgcgcgaagagcttgttctacgaggcgtacagcgtagcgaagggcgtcatcctcgggacaattgtcctcatggctgccctctatttcgcgaagatgcaggagttttcgcgagacgtcatcgcgctctttactggcatcaacttcgggctcatggtgggagagcggatcgtcgtgcgctccgtgctgcgcagcctgcgccgccgagggttgaatcagcgatttctcctcatcgtgggctggagtgcagcgacgcgtcgcttcctcgaggccctggaggcccagccgtggttcggttaccgtgtcataggctatctccgttacgaaggtgatgatgcgtcgcgcgcgacagtgccatgcatcggggcggttgaagacattcgttgcgtgcttgaggagcacctcgtcgatcaggtggtcatcgcggcaccgcgggatcgagtgggcgatctcgccgaagtgatttccgcctgcgaagctgtaggggtccagtcgctgatcttgccggattacttcgatctcctgccggccaggccccgttttgaaacctttggagatgtgccgctgattgacacgcgccatgtgccgctggacgatgcggtgaacgccttcctgaagcgcgcgttcgacatcgtgttcagtctgggggtcctgattggtctgtcgccgctgttggtggccattgcgattgcggtgaagctttcgtcgccagggccagtgctgtacgtgcaggagcgagtgggcaaaaatcgacggacatttaagatgtacaagttccgaacgatgtactgggatcccggggcggaccgtgcggagcgggattgcgcggaagaggcggacctgcggagcgctggttggacggtgaaaggcgatccgcggcggactcgcgtgggagcgttcctacgtcgcacgagtttggacgagctccctcagttctggaacgtgctgaagggagacatgagcgtcattgggccgcgcccggagcgccccgtcttcgtcgagcgattccgagaagaggtgccgcgttacatggtcaagcaccgcgtgagaccaggtatcaccgggtgggcgcaggtgcatggatggcgcggagatacttcgattgctgaacggattcgatttgacattgagtacatcgaaaactggtcattctggcttgatctcaagattgtgtggaagactatcaaacatgggtttgtgaatgagaatgcgtattga

SEQ ID NO: 101 - DNA, 1581 bp, Artificial
  Substituion in SEQ ID NO 87
atggacccgaacggtaggtttgcaagttggggaagaacgcccatcgacgtaagggtggtgtcaaaacatgtcgaaataggcttccctcgcttgccaatgatgcgctatactttccttggtagttcacgccgcatcgcgggtggtcctatgtttcgcacttatcaggagctgttccggcgaatcttcatcgctaccgacgcggccatcgtcgtcgtgagttttctaattgcatggtggctcaagtttgattctgggtggattccgcacgccggccatctcccactcctctattatcgagggccgcttctcatcgccgtgatcgtattcgtgcttgcaaacggtgtagcgcggctctacgaaccgatgcgcgcgaagagcttgttctacgaggcgtacagcgtagcgaagggcgtcatcctcgggacaattgtcctcatggctgccctctatttcgcgaagatgcaggagttttcgcgagacgtcatcgcgctctttactggcatcaacttcgggctcatggtgggagagcggatcgtcgtgcgctccgtgctgcgcagcctgcgccgccgagggttgaatcagcgatttctcctcatcgtgggctggagtgcagcgacgcgtcgcttcctcgaggccctggaggcccagccgtggttcggttaccgtgtcataggctatctccgttacgaaggtgatgatgcgtcgcgcgcgacagtgccatgcatcggggcggttgacgacattcgttgcgtgcttgaggagcacctcgtcgatcaggtggtcatcgcggcaccgcgggatcgagtgggcgatctcgccgaagtgatttccgcctgcgaagctgtaggggtccagtcgctgatcttgccggattacttcgatctcctgccggccaggccccgttttgaaacctttggagatgtgccgctgattgacacgcgccatgtgccgctggacgatgcggtgaacgccttcctgaagcgcgcgttcgacatcgtgttcagtctgggggtcctgattggtctgtcgccgctgttggtggccattgcgattgcggtgaagctttcgtcgccagggccagtgctgtacgtgcaggagcgagtgggcaaaaatcgacggacatttaagatgtacaagttccgaacgatgtactgggatcccggggcggaccgtgcggagcgggattgcgcggaagaggcggacctgcggagcgctggttggacggtgaaaggcgatccgcggcggactcgcgtgggagcgttcctacgtcgcacgagtttggacgagctccctcagttctggaacgtgctgaagggagacatgagcgtcattgggccgcgcccggagcgccccgtcttcgtcgagcgattccgagaagaggtgccgcgttacatggtcaagcaccgcgtgagaccaggtatcaccgggtgggcgcaggtgcatggatggcgcggagatacttcgattgctgaacggattcgatttgacattgagtacatcgaaaactggtcattctggcttgatctcaagattgtgtggaagactatcaaacatgggtttgtgaatgagaatgcgtattga

SEQ ID NO: 102 - DNA, 1581 bp, Artificial
  Substituion in SEQ ID NO 87
atggacccgaacggtaggtttgcaagttggggaagaacgcccatcgacgtaagggtggtgtcaaaacatgtcgaaataggcttccctcgcttgccaatgatgcgctatactttccttggtagttcacgccgcatcgcgggtggtcctatgtttcgcacttatcaggagctgttccggcgaatcttcatcgctaccgacgcggccatcgtcgtcgtgagttttctactcgcatggtggctcaagtttgattctgggtggattccgcacgccggccatctcccactcctctattatcgagggccgcttctcatcgccgtgatcgtattcgtgcttgcaaacggtgtagcgcggctctacgaaccgatgcgcgcgaagagcttgttctacgaggcgtacagcgtagcgaagggcgtcatcctcgggacaattgtcctcatggctgccctctatttcgcgaagatgcaggagttttcgcgagacgtcatcgcgctctttactggcatcaacttcgggctcatggtgggagagcggatcgtcgtgcgctccgtgctgcgcagcctgcgccgccgagggttgaatcagcgatttctcctcatcgtgggctggagtgcagcgacgcgtcgcttcctcgaggccctggaggcccagccgtggttcggttaccgtgtcataggctatctccgttacgaaggtgatgatgcgtcgcgcgcgacagtgccatgcatcggggcggttgacgacattcgttgcgtgcttgaggagcacctcgtcgatcaggtggtcatcgcggcaccgcgggatcgagtgggcgatctcgccgaagtgatttccgcctgcgaagctgtaggggtccagtcgctgatcttgccggattacttcgatctcctgccggccaggccccgttttgaaacctttggagatgtgccgctgattgacacgcgccatgtgccgctggacgatgcggtgaacgccttcctgaagcgcgcgttcgacatcgtgttcagtctgggggtcctgattggtctgtcgccgctgttggtggccattgcgattgcggtgaagctttcgtcgccagggccagtgctgtacgtgcaggagcgagtgggcaaaaatcgacggacatttaagatgtacaagttccgaacgatgtactgggatcccggggcggaccgtgcggagcgggattgcgcggaagaggcggacctgaaaagcgctggttggacggtgaaaggcgatccgcggcggactcgcgtgggagcgttcctacgtcgcacgagtttggacgagctccctcagttctggaacgtgctgaagggagacatgagcgtcattgggccgcgcccggagcgccccgtcttcgtcgagcgattccgagaagaggtgccgcgttacatggtcaagcaccgcgtgagaccaggtatcaccgggtgggcgcaggtgcatggatggcgcggagatacttcgattgctgaacggattcgatttgacattgagtacatcgaaaactggtcattctggcttgatctcaagattgtgtggaagactatcaaacatgggtttgtgaatgagaatgcgtattga

SEQ ID NO: 103 - protein, 385 aa, Alicyclobacillus acidocaldarius
MRMRIESTGSRLNRTVRIGVDCRPLVGDKTGIGYYLWEILDEWARAEIDFVELYLYASKPFELPSAFANTRLLYRKRVRRLSPGELWAQTALPVLVARDGIDVFWGPNFCLPLLCHVPTVLTIHDMVYKVLPDTMMRKTYYHNAFGLPLYARKSQKILVPSVNTKLDVVKYLRVAEDRVVVTPLGMPKRFRQELDTGIILSHRFGLEMGSYILAVGTVEPRKNLERVVRAFRLARKAHPDMKLVVAGTLGWASEQTQSALQDEGVIYVGYVSDVELMALYKGCRFFVYVPLYEGFGMPPLEAMAVGKPVLTANNSSLPEVVGRAAILVDATREECIREGMSLLWVDGDLRERLSEQALARARKFSWDETAQKTLNVILNVVGAQT

SEQ ID NO: 104 - DNA, 1158 bp, Alicyclobacillus acidocaldarius
atgagaatgcgtattgagagcactggaagtcgtttgaaccgcacggtgcgaattggcgtggactgcaggccgcttgtcggagataagaccgggattggttattatttgtgggaaattctcgacgaatgggctcgagccgagattgatttcgtcgagctttatctgtacgcatccaagccctttgaactcccgagtgcgtttgcgaacaccagactcctatatcggaagcgtgtgcgtcggctttcgccaggagaattatgggcgcagactgcacttcctgtacttgtggcccgtgatggcattgatgtgttttgggggccgaatttttgtttgcctcttttgtgccatgtaccgactgtacttacgattcacgatatggtgtacaaagtgctacccgatacgatgatgagaaagacgtattatcacaatgcgttcgggctgcctctttacgcgcgaaaatcacagaagatcctagtgccatctgtcaacacaaaattggatgtcgtcaaatatcttcgagtcgccgaagatcgtgtggttgtcacgccgctaggcatgccgaagcgcttccggcaggaattagatacgggaataattctttcgcataggttcggacttgagatgggatcgtacattttggccgtgggtaccgtggaaccaagaaaaaatttggagcgtgttgttcgggcgtttcgattggctcgaaaagctcatccagatatgaagttggttgtggctggtacattggggtgggcttcggagcaaacgcaatcggctttgcaagatgagggagtcatctatgttggctacgtgtctgatgttgagctgatggcattatacaaagggtgtaggttttttgtgtatgtaccgttatacgagggttttggcatgccgccacttgaggccatggcggttggtaagccggtattaacggcaaacaacagttctctcccagaagttgttgggcgggccgcgatcttggtggacgccacgcgtgaggagtgtataagggagggaatgtccttgctttgggttgatggtgacttaagggagcgcttgtctgagcaagcgttggcccgggctcgaaagttctcatgggatgaaactgctcagaaaacgctcaacgtcatcttgaacgtggttggtgcccagacgtga

SEQ ID NO: 105 - protein, 357 aa, Chloroflexus aggregans DSM 9485
RAGVSHYIEQVLLHLAQIDHENRYTIYTTRGLDQAALGLPPNFVVKPSRLPTINPRIRIPWEQGIAPFLLRGKVDLYHGCLNVAPLLSPVPTVITIHDLAFIRFPQTFRAYNRIYLDLATRLSARRASRILAVSEHTKREVAGLFGIPPERIVVTPNATRSHFRPFAADIIDQFRARKGLPARFILYVGTLEPRKNLTTLLEAFALVSRRVPSVPLLIGGGKGWMYQPIFARLEQLNLQDRVKFVGYIPEEELPLWYAAATIFVFPSIYEGFGMPPLEAMACGTPVITSNTSSLPEVVGDAGLMVDPAAPTALADAMMQLLTDADLHAALRQRGLERARRFSWTETAAKTLAVYREV

SEQ ID NO: 106 - protein, 354 aa, Roseiflexus sp. RS-1
RTGTEQYTCEVLAAIARLDTTNTYTLYCQRLPTTLPPLGANMRMRCIPLPRLWTHVRLSVEVLRHAPDVLFIPAHVLPLGAPLVRRMRTVVTIHDLGYLRYPEAHTTAQRLYLRLSTVWSARAASHLIAVSEATRNDLVRLAKVSPARVTVVHHGVADRFRQPVVDLGRARKIAGGNEPYFLYVGTVQPRKNLERVIEAFADASAQLTDQGRTPVLVIAGKRGWLSERIAQRAAALGIADRVRFVGYVADEDLPALYRASLAFVFPSLYEGFGMPVLEAMACGAPVLTSNSSSLPEVAGDAALLVDPHDTGAIAAGMVRLARDEALREELQQHGYRRAAQFTWDRCAEETLRVL

SEQ ID NO: 107 - protein, 360 aa, Rhizobium leguminosarum bv. trifolii WSM1325
MRISIDATGLGGPKTGTSVYLIEILSRWSRNTSINHEFTIFASEKAVSLCSEAGLDHRFRFVRAPNNRHIRVIWQQLMIPWHMRRLGIDVHWGTAFVLPVASQRPMAVTIHDLTFQLFPEVHERLKRFYFPAIMQRSVAKAQAVFAVSRTTETDLKRIIPESRGKTTVTLLAARKLGSDSQAPRDQRNSGDYLLFVGTLEPRKNLPRLLAAWQMLDDATRGNTRLVIVGATGWMVSDLLQSLKTNDTIDFLGHVSDSSLAELMQGARALLYPSLYEGFGLPVVEAMARGIPLLTSNTGATAEIAEGAAILVDPTNVDDIRGGLVRLLTEPELLGALSAQGRERAKSFSWERTAQLTLETL

SEQ ID NO: 108 - protein, 356 aa, Chloroflexus aurantiacus J-10-fl
RVTVAQRTGTERYSYELIAALDRIAPSDIHFRLYVNGRRDQLPPVSERATIHDIRLPRLWTHLRLGPTSWRARPHVLFVPAHVVPLLHPPTVVTIHDVGYRAFPETHTARRRLELELTTRWSLRAARHVITISHATKRDLINWYGADPNRITVTHLGCSSIFAPPADPRVVAAVTAHYGLDQRPYLLYIGTVQPRKNLSRVIDALALTIAAGYDLDLVIAGKRGWLSEPIERRAGELGIANRVHFTGFVADADLPALLAGALAFVFPSLYEGFGMPVVEAMACGTPVITSTSSSLPEIAGDAALLVDPLDTNAIAAAIMRLSDDQDLRATLRQRGLARAHLFNWETCARQTLAVLL

SEQ ID NO: 109 - protein, 368 aa, Roseiflexus castenholzii DSM 13941
MRIGIDISRMATIARTGTEHYTGEVVAAIARRDAVNTYTLYCNQPPARLPSLGANMTVRCIPLPRLWTHVRLSGEVLRHPPDVLFIPAHVLPLGAPLVRRMRTVVTVHDLGYVRYPEAHTAAQRLYLQMSTIWSARAASHLIAVSAATRNDLVRLAGVSPNRITVVHHGVAERFRRALADSSRTRAITGGDEPYFLYVGTVQPRKNLARVIAAFADASRRLTGCGMAPILVIAGKRGWLSEGIARRAAEVGIADRVRFVGYVADDDLPALYHGALAFVFPSLYEGFGMPVLEAMACGAPVLTSNSSSLPEVAGDAALIVDPLDTGAIAEGMVRLVCDAALRQELRQRGYRRAAQFTWDRCAEETLRVL

SEQ ID NO: 110 - protein, 385 aa, Artificial
  Substituion in SEQ ID NO 103
MRMRIESTGSRLNRTVRIGVDCRPLVGDKTGLGYYLWEILDEWARAEIDFVELYLYASKPFELPSAFANTRLLYRKRVRRLSPGELWAQTALPVLVARDGIDVFWGPNFCLPLLCHVPTVLTIHDMVYKVLPDTMMRKTYYHNAFGLPLYARKSQKILVPSVNTKLDVVKYLRVAEDRVVVTPLGMPKRFRQELDTGIILSHRFGLEMGSYILAVGTVEPRKNLERVVRAFRLARKAHPDMKLVVAGTLGWASEQTQSALQDEGVIYVGYVSDVELMALYKGCRFFVYVPLYEGFGMPPLEAMAVGKPVLTANNSSLPEVVGRAAILVDATREECIREGMSLLWVDGDLRERLSEQALARARKFSWDETAQKTLNVILNVVGAQT

SEQ ID NO: 111 - protein, 385 aa, Artificial
  Substituion in SEQ ID NO 103
MRMRIESTGSRLNRTVRIGVDCRPLVGDKTGIGYYLWEILDEWARAEIDFVELYLYASKPFELPSAFANTRLLYRKRVRRLSPGELWAQTALPVLVARDGIDVFWGPNFCLPLLCHVPTVLTIHDMVYKVLPDTMMRKTYYHNAFGLPLYARKSQKILVPSVNTKLDVVKYLRVAEDRVVVTPLGMPKRFRQELDTGIILSHRFGLEMGSYILAVGTVEPRKNLERVVRAFRLARKAHPDMKLVVAGTLGWASEQTQSALQDEGVIYVGYVSDVELMALYKGCRFFVYVPLYEGFGMPPLEAMAVGKPVLTANNSSLPEVVGRAAILVDATREECIREGMSILWVDGDLRERLSEQALARARKFSWDETAQKTLNVILNVVGAQT

SEQ ID NO: 112 - protein, 385 aa, Artificial
  Substituion in SEQ ID NO 103
MRMRIESTGSRLNRTVRIGVDCRPLVGDKTGIGYYLWEILDEWARAEIDFVELYLYASKPFELPSAFANTRLLYRKRVRRLSPGELWAQTALPVLVARDGIDVFWGPNFCLPLLCHVPTVLTIHDMVYKVLPDTMMRKTYYHNAFGLPLYARKSQRILVPSVNTKLDVVKYLRVAEDRVVVTPLGMPKRFRQELDTGIILSHRFGLEMGSYILAVGTVEPRKNLERVVRAFRLARKAHPDMKLVVAGTLGWASEQTQSALQDEGVIYVGYVSDVELMALYKGCRFFVYVPLYEGFGMPPLEAMAVGKPVLTANNSSLPEVVGRAAILVDATREECIREGMSLLWVDGDLRERLSEQALARARKFSWDETAQKTLNVILNVVGAQT

SEQ ID NO: 113 - protein, 385 aa, Artificial
  Substituion in SEQ ID NO 103
MRMRIESTGSRLNRTVRIGVDCRPLVGDKTGIGYYLWEILDEWARAEIDFVELYLYASKPFELPSAFANTRLLYRKRVRRLSPGELWAQTALPVLVARDGLDVFWGPNFCLPLLCHVPTVLTIHDMVYKVLPDTMMRKTYYHNAFGLPLYARKSQKILVPSVNTKLDVVKYLRVAEDRVVVTPLGMPKRFRQELDTGIILSHRFGLEMGSYILAVGTVEPRKNLERVVRAFRLARKAHPDMKLVVAGTLGWASEQTQSALQDEGVIYVGYVSDVELMALYKGCRFFVYVPLYEGFGMPPLEAMAVGKPVLTANNSSLPEVVGRAAILVDATREECIREGMSLLWVDGDLRERLSEQALARARKFSWDETAQKTLNVILNVVGAQT

SEQ ID NO: 114 - protein, 385 aa, Artificial
  Substituion in SEQ ID NO 103
MRMRIESTGSRLNRTVRIGVDCRPLVGDKTGIGYYLWEILDEWARAEIDFVELYLYASKPFELPSAFANTRLLYRKRVRRLSPGELWAQTALPVLVARDGIDVFWGPNFCLPLLCHVPTVLTIHDMVYKVLPDTMMRKTYYHNAFGLPLYARKSQKILVPSVNTKLDVVKYLRVAEDRVVVTPLGMPKRFRQELDTGIILSHRFGLEMGSYILAVGTVEPRKNLERVVRAFRLARKAHPDMKLVVAGTLGWASEQTQSALQDEGVIYVGYVSDVELMALYKGCRFFVYVPLYEGFGMPPLEAMAVGKPVLTANNSSLPEVVGRAAILVDATREECIREGMSLLWVDGDLRDRLSEQALARARKFSWDETAQKTLNVILNVVGAQT

SEQ ID NO: 115 - DNA, 1158 bp, Artificial
  Substituion in SEQ ID NO 104
atgagaatgcgtattgagagcactggaagtcgtttgaaccgcacggtgcgaattggcgtggactgcaggccgcttgtcggagataagaccgggttaggttattatttgtgggaaattctcgacgaatgggctcgagccgagattgatttcgtcgagctttatctgtacgcatccaagccctttgaactcccgagtgcgtttgcgaacaccagactcctatatcggaagcgtgtgcgtcggctttcgccaggagaattatgggcgcagactgcacttcctgtacttgtggcccgtgatggcattgatgtgttttgggggccgaatttttgtttgcctcttttgtgccatgtaccgactgtacttacgattcacgatatggtgtacaaagtgctacccgatacgatgatgagaaagacgtattatcacaatgcgttcgggctgcctctttacgcgcgaaaatcacagaagatcctagtgccatctgtcaacacaaaattggatgtcgtcaaatatcttcgagtcgccgaagatcgtgtggttgtcacgccgctaggcatgccgaagcgcttccggcaggaattagatacgggaataattctttcgcataggttcggacttgagatgggatcgtacattttggccgtgggtaccgtggaaccaagaaaaaatttggagcgtgttgttcgggcgtttcgattggctcgaaaagctcatccagatatgaagttggttgtggctggtacattggggtgggcttcggagcaaacgcaatcggctttgcaagatgagggagtcatctatgttggctacgtgtctgatgttgagctgatggcattatacaaagggtgtaggttttttgtgtatgtaccgttatacgagggttttggcatgccgccacttgaggccatggcggttggtaagccggtattaacggcaaacaacagttctctcccagaagttgttgggcgggccgcgatcttggtggacgccacgcgtgaggagtgtataagggagggaatgtccttgctttgggttgatggtgacttaagggagcgcttgtctgagcaagcgttggcccgggctcgaaagttctcatgggatgaaactgctcagaaaacgctcaacgtcatcttgaacgtggttggtgcccagacgtga

SEQ ID NO: 116 - DNA, 1158 bp, Artificial
  Substituion in SEQ ID NO 104
atgagaatgcgtattgagagcactggaagtcgtttgaaccgcacggtgcgaattggcgtggactgcaggccgcttgtcggagataagaccgggattggttattatttgtgggaaattctcgacgaatgggctcgagccgagattgatttcgtcgagctttatctgtacgcatccaagccctttgaactcccgagtgcgtttgcgaacaccagactcctatatcggaagcgtgtgcgtcggctttcgccaggagaattatgggcgcagactgcacttcctgtacttgtggcccgtgatggcattgatgtgttttgggggccgaatttttgtttgcctcttttgtgccatgtaccgactgtacttacgattcacgatatggtgtacaaagtgctacccgatacgatgatgagaaagacgtattatcacaatgcgttcgggctgcctctttacgcgcgaaaatcacagaagatcctagtgccatctgtcaacacaaaattggatgtcgtcaaatatcttcgagtcgccgaagatcgtgtggttgtcacgccgctaggcatgccgaagcgcttccggcaggaattagatacgggaataattctttcgcataggttcggacttgagatgggatcgtacattttggccgtgggtaccgtggaaccaagaaaaaatttggagcgtgttgttcgggcgtttcgattggctcgaaaagctcatccagatatgaagttggttgtggctggtacattggggtgggcttcggagcaaacgcaatcggctttgcaagatgagggagtcatctatgttggctacgtgtctgatgttgagctgatggcattatacaaagggtgtaggttttttgtgtatgtaccgttatacgagggttttggcatgccgccacttgaggccatggcggttggtaagccggtattaacggcaaacaacagttctctcccagaagttgttgggcgggccgcgatcttggtggacgccacgcgtgaggagtgtataagggagggaatgtccattctttgggttgatggtgacttaagggagcgcttgtctgagcaagcgttggcccgggctcgaaagttctcatgggatgaaactgctcagaaaacgctcaacgtcatcttgaacgtggttggtgcccagacgtga

SEQ ID NO: 117 - DNA, 1158 bp, Artificial
  Substituion in SEQ ID NO 104
atgagaatgcgtattgagagcactggaagtcgtttgaaccgcacggtgcgaattggcgtggactgcaggccgcttgtcggagataagaccgggattggttattatttgtgggaaattctcgacgaatgggctcgagccgagattgatttcgtcgagctttatctgtacgcatccaagccctttgaactcccgagtgcgtttgcgaacaccagactcctatatcggaagcgtgtgcgtcggctttcgccaggagaattatgggcgcagactgcacttcctgtacttgtggcccgtgatggcattgatgtgttttgggggccgaatttttgtttgcctcttttgtgccatgtaccgactgtacttacgattcacgatatggtgtacaaagtgctacccgatacgatgatgagaaagacgtattatcacaatgcgttcgggctgcctctttacgcgcgaaaatcacagcgtatcctagtgccatctgtcaacacaaaattggatgtcgtcaaatatcttcgagtcgccgaagatcgtgtggttgtcacgccgctaggcatgccgaagcgcttccggcaggaattagatacgggaataattctttcgcataggttcggacttgagatgggatcgtacattttggccgtgggtaccgtggaaccaagaaaaaatttggagcgtgttgttcgggcgtttcgattggctcgaaaagctcatccagatatgaagttggttgtggctggtacattggggtgggcttcggagcaaacgcaatcggctttgcaagatgagggagtcatctatgttggctacgtgtctgatgttgagctgatggcattatacaaagggtgtaggttttttgtgtatgtaccgttatacgagggttttggcatgccgccacttgaggccatggcggttggtaagccggtattaacggcaaacaacagttctctcccagaagttgttgggcgggccgcgatcttggtggacgccacgcgtgaggagtgtataagggagggaatgtccttgctttgggttgatggtgacttaagggagcgcttgtctgagcaagcgttggcccgggctcgaaagttctcatgggatgaaactgctcagaaaacgctcaacgtcatcttgaacgtggttggtgcccagacgtga

SEQ ID NO: 118 - DNA, 1158 bp, Artificial
  Substituion in SEQ ID NO 104
atgagaatgcgtattgagagcactggaagtcgtttgaaccgcacggtgcgaattggcgtggactgcaggccgcttgtcggagataagaccgggattggttattatttgtgggaaattctcgacgaatgggctcgagccgagattgatttcgtcgagctttatctgtacgcatccaagccctttgaactcccgagtgcgtttgcgaacaccagactcctatatcggaagcgtgtgcgtcggctttcgccaggagaattatgggcgcagactgcacttcctgtacttgtggcccgtgatggcttagatgtgttttgggggccgaatttttgtttgcctcttttgtgccatgtaccgactgtacttacgattcacgatatggtgtacaaagtgctacccgatacgatgatgagaaagacgtattatcacaatgcgttcgggctgcctctttacgcgcgaaaatcacagaagatcctagtgccatctgtcaacacaaaattggatgtcgtcaaatatcttcgagtcgccgaagatcgtgtggttgtcacgccgctaggcatgccgaagcgcttccggcaggaattagatacgggaataattctttcgcataggttcggacttgagatgggatcgtacattttggccgtgggtaccgtggaaccaagaaaaaatttggagcgtgttgttcgggcgtttcgattggctcgaaaagctcatccagatatgaagttggttgtggctggtacattggggtgggcttcggagcaaacgcaatcggctttgcaagatgagggagtcatctatgttggctacgtgtctgatgttgagctgatggcattatacaaagggtgtaggttttttgtgtatgtaccgttatacgagggttttggcatgccgccacttgaggccatggcggttggtaagccggtattaacggcaaacaacagttctctcccagaagttgttgggcgggccgcgatcttggtggacgccacgcgtgaggagtgtataagggagggaatgtccttgctttgggttgatggtgacttaagggagcgcttgtctgagcaagcgttggcccgggctcgaaagttctcatgggatgaaactgctcagaaaacgctcaacgtcatcttgaacgtggttggtgcccagacgtga

SEQ ID NO: 119 - DNA, 1158 bp, Artificial
  Substituion in SEQ ID NO 104
atgagaatgcgtattgagagcactggaagtcgtttgaaccgcacggtgcgaattggcgtggactgcaggccgcttgtcggagataagaccgggattggttattatttgtgggaaattctcgacgaatgggctcgagccgagattgatttcgtcgagctttatctgtacgcatccaagccctttgaactcccgagtgcgtttgcgaacaccagactcctatatcggaagcgtgtgcgtcggctttcgccaggagaattatgggcgcagactgcacttcctgtacttgtggcccgtgatggcattgatgtgttttgggggccgaatttttgtttgcctcttttgtgccatgtaccgactgtacttacgattcacgatatggtgtacaaagtgctacccgatacgatgatgagaaagacgtattatcacaatgcgttcgggctgcctctttacgcgcgaaaatcacagaagatcctagtgccatctgtcaacacaaaattggatgtcgtcaaatatcttcgagtcgccgaagatcgtgtggttgtcacgccgctaggcatgccgaagcgcttccggcaggaattagatacgggaataattctttcgcataggttcggacttgagatgggatcgtacattttggccgtgggtaccgtggaaccaagaaaaaatttggagcgtgttgttcgggcgtttcgattggctcgaaaagctcatccagatatgaagttggttgtggctggtacattggggtgggcttcggagcaaacgcaatcggctttgcaagatgagggagtcatctatgttggctacgtgtctgatgttgagctgatggcattatacaaagggtgtaggttttttgtgtatgtaccgttatacgagggttttggcatgccgccacttgaggccatggcggttggtaagccggtattaacggcaaacaacagttctctcccagaagttgttgggcgggccgcgatcttggtggacgccacgcgtgaggagtgtataagggagggaatgtccttgctttgggttgatggtgacttaagggatcgcttgtctgagcaagcgttggcccgggctcgaaagttctcatgggatgaaactgctcagaaaacgctcaacgtcatcttgaacgtggttggtgcccagacgtga

SEQ ID NO: 120 - protein, 506 aa, Alicyclobacillus acidocaldarius
MVSLTISLLADIYEGRHGFAGISTDMRTTYAGLASTADISLTGLIYAQRPLGNESVVRHLLMMSRPDLMRLAHEIAGHRVPDNVFATMEHMLSGKRGMMLGDLSRVVRWALLTTRTYRTHPIDSDVYYDLIWRFFFEKTLAPKELENVRQTQFVISGLSHAIGNATLKRWGRPLRLDARKWDVVLTFNVSPIEFVGRRITRVHDLIPLVRPDFVPIEHAEIFKAQLELTLRNSQAIVTVSKCAAGDLVRLYPNTQSKIEIIPCATSRRYYRDLSSIPLQRIVERRLSEFHRHCRKRDRRLPQITPFKYFIYHGTIEPKKNVKTLLLAFDSLVNQERFREYKLIIAGRFGWMYDQERTHMAKLIEKGAVIHLEDTTNDELRVLLSNALAHVFPSYYEGFGIPPVEALSCGCPTIVSNVSSLPEVVGRAGILVSPYDAEWLASEMGAVALAPESVRERIERESKYVLEQYAESTVRDKWMRVIEKSLSLGGRTASTLMAENYRVDSVL

SEQ ID NO: 121 - DNA, 1521 bp, Alicyclobacillus acidocaldarius
gtggtttcgttgacgatttcgttgctcgcggatatctatgaaggacgacatgggttcgccggtatttcgacagacatgagaacgacgtatgctggcctggcgtcgactgccgacatatcgctcacgggactcatttatgctcagcgtcccttgggcaacgaatcggtcgtgcggcatcttctgatgatgtctcgccccgatttgatgcgactcgctcacgaaatcgcagggcatcgagttcccgataacgtcttcgcaacgatggagcacatgttgtctggaaaacgaggtatgatgctgggcgacctgtcgcgtgtcgttaggtgggcacttttaacaacgaggacttaccgtacccatccgatcgacagtgacgtttattatgacttgatatggcggttcttttttgagaagacactggcgccaaaggaactcgagaatgtacgccagacgcagtttgtgatatctggcttgtctcacgcaattggcaacgcaacgctgaaaagatggggccgacctcttcgattggatgctagaaaatgggatgtggttcttacctttaacgtgtcacccatcgaatttgtcggaagacggatcactcgcgtgcatgacctcataccattggttcgtccggattttgtgcctattgagcatgctgagatcttcaaggcacaactcgagttgacgctgaggaattcgcaggccattgtcacggtgtcaaagtgtgctgccggcgatctggtgcgtttatatccaaatacgcagtccaaaattgaaatcatcccatgcgcgacgtctcgacgatattatcgtgatttatcatcgattcctctgcagcgtattgtcgagcgaaggttgtcggagtttcacaggcattgtcgcaagcgcgatcgccgattaccgcagattacgccgttcaaatattttatatatcacgggacgatcgagccgaagaaaaatgtcaaaacgcttctgctagcctttgactctttggtaaatcaagagcggtttagagagtataagctcatcattgcaggaagatttggttggatgtatgaccaagagcgtacgcatatggcgaaattgatcgagaaaggtgccgtcattcatctcgaggatacaacgaacgatgaactcagggttcttttaagcaacgcattggctcatgtgtttccgtcttattacgaaggttttggtataccgcctgttgaggctttgtcgtgtgggtgtcccactattgtttcgaatgtttcttctctaccggaggttgtagggcgagccgggatcctcgtcagtccgtatgatgcagaatggttggcctcggaaatgggggctgtggcgctggctccagaatcagtacgagagcggatcgaacgagaatccaaatatgtgttggaacagtacgccgaatcgactgttcgggacaagtggatgagggtaattgaaaagtcgcttagtttgggtgggcgtacagcctcaacgctgatggcggagaattaccgggtcgactcagtgctgtag

SEQ ID NO: 122 - protein, 265 aa, Methanococcus aeolicus Nankai-3
KIITVYDVIPLQFPETYAKITVFRYKLLFSKTLNTSNKIISISHHTKQDLIKHFKISEDKIKVIHLAANENYKPLKENEINNIKQKYNLNYPFILYVGTLEPRKNIPNLLKALYKLKKHSIKHKLVITGKKGWKYKSIFETIEKLNLQKDVIFTGYVPDEDLPALYNAADLFVYPSLYEGFGLPPLEAMQCGTPVITSNTSSLPEVVGDAGIMVNPYDVDELANKMYEVLTNDGIREELSKKGIERAKLFSWKKCAEEHLKVYEE

SEQ ID NO: 123 - protein, 297 aa, Nitrosococcus oceani ATCC 19707
YEMANQTYLRLGRLTRVKFPRPPALWHATTPLPIRIRGARMVTTVHDLIPLRLPYTTLDNKQFFYRLVRDALRDSDLVLTVSECSKRDILAFYDIPEERVVVTYQSLSLKKASTHQRQSFSVLKSYGLTPGQYVLFVGNIEPKKNLATLIKAMSMLQHDLPLVVVGRKAWLWEEQLQMAKRYFGSNEAKRLRILDYVPSTVLSTLYSHALCMAFPSLYEGFGLPALEAMSHGCPVISSNASSLPEVCGEAALYMDPHDSDGLYAHIESLLEDVCLRARLIEGGYRRVEYFSPERYAE

SEQ ID NO: 124 - protein, 263 aa, Clostridium tetani E88
KKIITVHDLIPYTMPETVGRGYLKKFLRNMPQLIYDADAIITVSKYSKKDILRFFPMDEKKIFVTHLAADEKYRPLNKDKCNYILKNHYNIDNPFILYIGGFSPRKNIKSLLISFSKIYKNLDKDYKLVIVGANKNGTKILMDMAKDLNIESKIIFTGFVPEDHLPILYNSCETFVYPSLYEGFGLPPLEAMCCGTPVITSNVTSIPEVVGDGGILINPNDIDELSNSLEKTLLDVSFKYELKKKALERSSLYSWENTAKNTL

SEQ ID NO: 125 - protein, 270 aa, Chloroflexus aurantiacus J-10-fl
WQRLRLPLRIEWFVGPLDIVHAPDFVLPPTKARTLLTIHDLTFLVEPACAEPNLRRYLSTAVPRSLQRANLIIVDSKATAGDLGRLYGIPRQRVRLLYPAVDERFRPLTGDAVVRVRERLHLPARFLLFVGTLEPRKNLVRLLQAFALLQNEYPDLHLLLAGRKGWLYDDIFAAVEQYHLSERVHFLDFVADEDLPALYNLAEAFVYPSLYEGFGFPVLEALACGTPVVTTKVSSLPEVAGTAAIFVDPLEPEDIADGIRTALSNPASLR

SEQ ID NO: 126 - protein, 271 aa, Bacteroides vulgatus ATCC 8482
FKVKRIVTIHDLTFFIHPSVHTFIKRYYFRLFIKLACRYADRLICVSESTKKDLERICGRRSVSIDVIPLSCSPKMQVGEQELELVKKKFGVVSQYMLFIGTLEPRKNILNLINAFYKFSQKNRDYSLVIIGKKGWFYESIFKLVEELHLERSVVFTGFVTTKEKFILLSGAHSFIYPSIYEGFGLPVLEAITYGIPTITSKLSSLPEVAGNAALYINPYDVQSISDAIESVNCDEETRRKLIKNSEKQRLKYSWKKTANLTYSLYNRCGS

SEQ ID NO: 127 - protein, 506 aa, Artificial
  Substituion in SEQ ID NO 120
MVSLTISLLADIYEGRHGFAGISTDMRTTYAGLASTADISLTGLIYAQRPLGNESVVRHLLMMSRPDLMRLAHEIAGHRVPDNVFATMEHMLSGKRGMMLGDLSRVVRWALLTTRTYRTHPIDSDVYYDLIWRFFFEKTLAPKELENVRQTQFVISGLSHAIGNATLKRWGRPLRLDARKWDVVLTFNVSPIEFVGRRITRVHDLIPLVRPDFVPIEHAEIFKAQLELTLRNSQAIVTVSKCAAGDLVRLYPNTQSKIEIIPCATSRRYYRDLSSIPLQRIVERRLSEFHRHCRKRDRRLPQITPFKYFIYHGTIEPKKNVKTLLLAFDSLVNQERFREYKLIIAGRFGWMYDQERTHMAKLIEKGAVIHLEDTTNDELRVLLSNALAHVFPSYYEGFGIPPVEALSCGCPTIVSNVSSLPEVVGRAGILVSPYDAEWLASEMGAVALAPESVRERIDRESKYVLEQYAESTVRDKWMRVIEKSLSLGGRTASTLMAENYRVDSVL

SEQ ID NO: 128 - protein, 506 aa, Artificial
  Substituion in SEQ ID NO 120
MVSLTISLLADIYEGRHGFAGISTDMRTTYAGLASTADISLTGLIYAQRPLGNESVVRHLLMMSRPDLMRLAHEIAGHRVPDNVFATMEHMLSGKRGMMLGDLSRVVRWALLTTRTYRTHPIDSDVYYDLIWRFFFEKTLAPKELENVRQTQFVISGLSHAIGNATLKRWGRPLRLDARKWDVVLTFNVSPIEFVGRRITRVHDLIPLVRPDFVPIEHAEIFKAQLELTLRNSQAIVTVSKCAAGDLVRLYPNTQSKIEIIPCATSRRYYRDLSSIPLQRIVERRLSEFHRHCRKRDRRLPQITPFKYFIYHGTIEPKKNVKTLLLAFDSLVNQERFREYKLIIAGRFGWMYDQERTHMAKLIEKGAVIHLEDTTNDELRVLISNALAHVFPSYYEGFGIPPVEALSCGCPTIVSNVSSLPEVVGRAGILVSPYDAEWLASEMGAVALAPESVRERIERESKYVLEQYAESTVRDKWMRVIEKSLSLGGRTASTLMAENYRVDSVL

SEQ ID NO: 129 - protein, 506 aa, Artificial
  Substituion in SEQ ID NO 120
MVSLTISLLADIYEGRHGFAGISTDMRTTYAGLASTADISLTGLIYAQRPLGNESVVRHLLMMSRPDLMRLAHEIAGHRVPDNVFATMEHMLSGKRGMMLGDLSRVVRWALLTTRTYRTHPIDSDVYYDLIWRFFFEKTLAPKELDNVRQTQFVISGLSHAIGNATLKRWGRPLRLDARKWDVVLTFNVSPIEFVGRRITRVHDLIPLVRPDFVPIEHAEIFKAQLELTLRNSQAIVTVSKCAAGDLVRLYPNTQSKIEIIPCATSRRYYRDLSSIPLQRIVERRLSEFHRHCRKRDRRLPQITPFKYFIYHGTIEPKKNVKTLLLAFDSLVNQERFREYKLIIAGRFGWMYDQERTHMAKLIEKGAVIHLEDTTNDELRVLLSNALAHVFPSYYEGFGIPPVEALSCGCPTIVSNVSSLPEVVGRAGILVSPYDAEWLASEMGAVALAPESVRERIERESKYVLEQYAESTVRDKWMRVIEKSLSLGGRTASTLMAENYRVDSVL

SEQ ID NO: 130 - protein, 506 aa, Artificial
  Substituion in SEQ ID NO 120
MVSLTISLLADIYEGRHGFAGISTDMRTTYAGLASTADISLTGLIYAQRPLGNESVVRHLLMMSRPDLMRLAHEIAGHRVPDNVFATMEHMLSGKRGMMLGDLSRVVRWALLTTRTYRTHPIDSDVYYDLIWRFFFEKTLAPKELENVRQTQFVISGLSHAIGNATLKRWGRPLRLDARKWDVVLTFNVSPIEFVGRRITRVHDLIPLVRPDFVPIEHAEIFKAQLELTLRNSQAIVTVSKCAAGDLVRLYPNTQSKIEIIPCATSRRYYRDLSSIPLQRIVERRLSEFHRHCRKRDRRLPQITPFKYFIYHGTIEPKKNVKTLLLAFDSLVNQERFREYKLIIAGRFGWMYDQERTHMAKLIEKGAVIHLEDTTNEELRVLLSNALAHVFPSYYEGFGIPPVEALSCGCPTIVSNVSSLPEVVGRAGILVSPYDAEWLASEMGAVALAPESVRERIERESKYVLEQYAESTVRDKWMRVIEKSLSLGGRTASTLMAENYRVDSVL

SEQ ID NO: 131 - protein, 506 aa, Artificial
  Substituion in SEQ ID NO 120
MVSLTISLLADIYEGRHGFAGISTDMRTTYAGLASTADISLTGLIYAQRPLGNESVVRHLLMMSRPDLMRLAHEIAGHRVPDNVFATMEHMLSGKRGMMLGDLSRVVRWALLTTRTYRTHPIDSDVYYDLIWRFFFEKTLAPKELENVRQTQFVISGLSHAIGNATLKRWGRPLRLDARKWDVVLTFNVSPIEFVGRRITRVHDLIPLVRPDFVPIEHAEIFKAQLELTLRNSQAIVTVSKCAAGDLVRLYPNTQSKIEIIPCATSRRYYRDLSSIPLQRIVERRLSEFHRHCRKRDRRLPQITPFKYFIYHGTIEPKKNVKTLLLAFDSLVNQERFREYKLIIAGRFGWMYDQERTHMAKLIEKGAVIHLEDTTNDELRVLLSNALAHVFPSYYEGFGIPPVEALSCGCPTIVSNVSSLPEVVGRAGILVSPYDAEWLASEMGAVALAPESVRERIEKESKYVLEQYAESTVRDKWMRVIEKSLSLGGRTASTLMAENYRVDSVL

SEQ ID NO: 132 - DNA, 1521 bp, Artificial
  Substituion in SEQ ID NO 121
gtggtttcgttgacgatttcgttgctcgcggatatctatgaaggacgacatgggttcgccggtatttcgacagacatgagaacgacgtatgctggcctggcgtcgactgccgacatatcgctcacgggactcatttatgctcagcgtcccttgggcaacgaatcggtcgtgcggcatcttctgatgatgtctcgccccgatttgatgcgactcgctcacgaaatcgcagggcatcgagttcccgataacgtcttcgcaacgatggagcacatgttgtctggaaaacgaggtatgatgctgggcgacctgtcgcgtgtcgttaggtgggcacttttaacaacgaggacttaccgtacccatccgatcgacagtgacgtttattatgacttgatatggcggttcttttttgagaagacactggcgccaaaggaactcgagaatgtacgccagacgcagtttgtgatatctggcttgtctcacgcaattggcaacgcaacgctgaaaagatggggccgacctcttcgattggatgctagaaaatgggatgtggttcttacctttaacgtgtcacccatcgaatttgtcggaagacggatcactcgcgtgcatgacctcataccattggttcgtccggattttgtgcctattgagcatgctgagatcttcaaggcacaactcgagttgacgctgaggaattcgcaggccattgtcacggtgtcaaagtgtgctgccggcgatctggtgcgtttatatccaaatacgcagtccaaaattgaaatcatcccatgcgcgacgtctcgacgatattatcgtgatttatcatcgattcctctgcagcgtattgtcgagcgaaggttgtcggagtttcacaggcattgtcgcaagcgcgatcgccgattaccgcagattacgccgttcaaatattttatatatcacgggacgatcgagccgaagaaaaatgtcaaaacgcttctgctagcctttgactctttggtaaatcaagagcggtttagagagtataagctcatcattgcaggaagatttggttggatgtatgaccaagagcgtacgcatatggcgaaattgatcgagaaaggtgccgtcattcatctcgaggatacaacgaacgatgaactcagggttcttttaagcaacgcattggctcatgtgtttccgtcttattacgaaggttttggtataccgcctgttgaggctttgtcgtgtgggtgtcccactattgtttcgaatgtttcttctctaccggaggttgtagggcgagccgggatcctcgtcagtccgtatgatgcagaatggttggcctcggaaatgggggctgtggcgctggctccagaatcagtacgagagcggatcgatcgagaatccaaatatgtgttggaacagtacgccgaatcgactgttcgggacaagtggatgagggtaattgaaaagtcgcttagtttgggtgggcgtacagcctcaacgctgatggcggagaattaccgggtcgactcagtgctgtag

SEQ ID NO: 133 - DNA, 1521 bp, Artificial
  Substituion in SEQ ID NO 121
gtggtttcgttgacgatttcgttgctcgcggatatctatgaaggacgacatgggttcgccggtatttcgacagacatgagaacgacgtatgctggcctggcgtcgactgccgacatatcgctcacgggactcatttatgctcagcgtcccttgggcaacgaatcggtcgtgcggcatcttctgatgatgtctcgccccgatttgatgcgactcgctcacgaaatcgcagggcatcgagttcccgataacgtcttcgcaacgatggagcacatgttgtctggaaaacgaggtatgatgctgggcgacctgtcgcgtgtcgttaggtgggcacttttaacaacgaggacttaccgtacccatccgatcgacagtgacgtttattatgacttgatatggcggttcttttttgagaagacactggcgccaaaggaactcgagaatgtacgccagacgcagtttgtgatatctggcttgtctcacgcaattggcaacgcaacgctgaaaagatggggccgacctcttcgattggatgctagaaaatgggatgtggttcttacctttaacgtgtcacccatcgaatttgtcggaagacggatcactcgcgtgcatgacctcataccattggttcgtccggattttgtgcctattgagcatgctgagatcttcaaggcacaactcgagttgacgctgaggaattcgcaggccattgtcacggtgtcaaagtgtgctgccggcgatctggtgcgtttatatccaaatacgcagtccaaaattgaaatcatcccatgcgcgacgtctcgacgatattatcgtgatttatcatcgattcctctgcagcgtattgtcgagcgaaggttgtcggagtttcacaggcattgtcgcaagcgcgatcgccgattaccgcagattacgccgttcaaatattttatatatcacgggacgatcgagccgaagaaaaatgtcaaaacgcttctgctagcctttgactctttggtaaatcaagagcggtttagagagtataagctcatcattgcaggaagatttggttggatgtatgaccaagagcgtacgcatatggcgaaattgatcgagaaaggtgccgtcattcatctcgaggatacaacgaacgatgaactcagggttcttattagcaacgcattggctcatgtgtttccgtcttattacgaaggttttggtataccgcctgttgaggctttgtcgtgtgggtgtcccactattgtttcgaatgtttcttctctaccggaggttgtagggcgagccgggatcctcgtcagtccgtatgatgcagaatggttggcctcggaaatgggggctgtggcgctggctccagaatcagtacgagagcggatcgaacgagaatccaaatatgtgttggaacagtacgccgaatcgactgttcgggacaagtggatgagggtaattgaaaagtcgcttagtttgggtgggcgtacagcctcaacgctgatggcggagaattaccgggtcgactcagtgctgtag

SEQ ID NO: 134 - DNA, 1521 bp, Artificial
  Substituion in SEQ ID NO 121
gtggtttcgttgacgatttcgttgctcgcggatatctatgaaggacgacatgggttcgccggtatttcgacagacatgagaacgacgtatgctggcctggcgtcgactgccgacatatcgctcacgggactcatttatgctcagcgtcccttgggcaacgaatcggtcgtgcggcatcttctgatgatgtctcgccccgatttgatgcgactcgctcacgaaatcgcagggcatcgagttcccgataacgtcttcgcaacgatggagcacatgttgtctggaaaacgaggtatgatgctgggcgacctgtcgcgtgtcgttaggtgggcacttttaacaacgaggacttaccgtacccatccgatcgacagtgacgtttattatgacttgatatggcggttcttttttgagaagacactggcgccaaaggaactcgataatgtacgccagacgcagtttgtgatatctggcttgtctcacgcaattggcaacgcaacgctgaaaagatggggccgacctcttcgattggatgctagaaaatgggatgtggttcttacctttaacgtgtcacccatcgaatttgtcggaagacggatcactcgcgtgcatgacctcataccattggttcgtccggattttgtgcctattgagcatgctgagatcttcaaggcacaactcgagttgacgctgaggaattcgcaggccattgtcacggtgtcaaagtgtgctgccggcgatctggtgcgtttatatccaaatacgcagtccaaaattgaaatcatcccatgcgcgacgtctcgacgatattatcgtgatttatcatcgattcctctgcagcgtattgtcgagcgaaggttgtcggagtttcacaggcattgtcgcaagcgcgatcgccgattaccgcagattacgccgttcaaatattttatatatcacgggacgatcgagccgaagaaaaatgtcaaaacgcttctgctagcctttgactctttggtaaatcaagagcggtttagagagtataagctcatcattgcaggaagatttggttggatgtatgaccaagagcgtacgcatatggcgaaattgatcgagaaaggtgccgtcattcatctcgaggatacaacgaacgatgaactcagggttcttttaagcaacgcattggctcatgtgtttccgtcttattacgaaggttttggtataccgcctgttgaggctttgtcgtgtgggtgtcccactattgtttcgaatgtttcttctctaccggaggttgtagggcgagccgggatcctcgtcagtccgtatgatgcagaatggttggcctcggaaatgggggctgtggcgctggctccagaatcagtacgagagcggatcgaacgagaatccaaatatgtgttggaacagtacgccgaatcgactgttcgggacaagtggatgagggtaattgaaaagtcgcttagtttgggtgggcgtacagcctcaacgctgatggcggagaattaccgggtcgactcagtgctgtag

SEQ ID NO: 135 - DNA, 1521 bp, Artificial
  Substituion in SEQ ID NO 121
gtggtttcgttgacgatttcgttgctcgcggatatctatgaaggacgacatgggttcgccggtatttcgacagacatgagaacgacgtatgctggcctggcgtcgactgccgacatatcgctcacgggactcatttatgctcagcgtcccttgggcaacgaatcggtcgtgcggcatcttctgatgatgtctcgccccgatttgatgcgactcgctcacgaaatcgcagggcatcgagttcccgataacgtcttcgcaacgatggagcacatgttgtctggaaaacgaggtatgatgctgggcgacctgtcgcgtgtcgttaggtgggcacttttaacaacgaggacttaccgtacccatccgatcgacagtgacgtttattatgacttgatatggcggttcttttttgagaagacactggcgccaaaggaactcgagaatgtacgccagacgcagtttgtgatatctggcttgtctcacgcaattggcaacgcaacgctgaaaagatggggccgacctcttcgattggatgctagaaaatgggatgtggttcttacctttaacgtgtcacccatcgaatttgtcggaagacggatcactcgcgtgcatgacctcataccattggttcgtccggattttgtgcctattgagcatgctgagatcttcaaggcacaactcgagttgacgctgaggaattcgcaggccattgtcacggtgtcaaagtgtgctgccggcgatctggtgcgtttatatccaaatacgcagtccaaaattgaaatcatcccatgcgcgacgtctcgacgatattatcgtgatttatcatcgattcctctgcagcgtattgtcgagcgaaggttgtcggagtttcacaggcattgtcgcaagcgcgatcgccgattaccgcagattacgccgttcaaatattttatatatcacgggacgatcgagccgaagaaaaatgtcaaaacgcttctgctagcctttgactctttggtaaatcaagagcggtttagagagtataagctcatcattgcaggaagatttggttggatgtatgaccaagagcgtacgcatatggcgaaattgatcgagaaaggtgccgtcattcatctcgaggatacaacgaacgaagaactcagggttcttttaagcaacgcattggctcatgtgtttccgtcttattacgaaggttttggtataccgcctgttgaggctttgtcgtgtgggtgtcccactattgtttcgaatgtttcttctctaccggaggttgtagggcgagccgggatcctcgtcagtccgtatgatgcagaatggttggcctcggaaatgggggctgtggcgctggctccagaatcagtacgagagcggatcgaacgagaatccaaatatgtgttggaacagtacgccgaatcgactgttcgggacaagtggatgagggtaattgaaaagtcgcttagtttgggtgggcgtacagcctcaacgctgatggcggagaattaccgggtcgactcagtgctgtag

SEQ ID NO: 136 - DNA, 1521 bp, Artificial
  Substituion in SEQ ID NO 121
gtggtttcgttgacgatttcgttgctcgcggatatctatgaaggacgacatgggttcgccggtatttcgacagacatgagaacgacgtatgctggcctggcgtcgactgccgacatatcgctcacgggactcatttatgctcagcgtcccttgggcaacgaatcggtcgtgcggcatcttctgatgatgtctcgccccgatttgatgcgactcgctcacgaaatcgcagggcatcgagttcccgataacgtcttcgcaacgatggagcacatgttgtctggaaaacgaggtatgatgctgggcgacctgtcgcgtgtcgttaggtgggcacttttaacaacgaggacttaccgtacccatccgatcgacagtgacgtttattatgacttgatatggcggttcttttttgagaagacactggcgccaaaggaactcgagaatgtacgccagacgcagtttgtgatatctggcttgtctcacgcaattggcaacgcaacgctgaaaagatggggccgacctcttcgattggatgctagaaaatgggatgtggttcttacctttaacgtgtcacccatcgaatttgtcggaagacggatcactcgcgtgcatgacctcataccattggttcgtccggattttgtgcctattgagcatgctgagatcttcaaggcacaactcgagttgacgctgaggaattcgcaggccattgtcacggtgtcaaagtgtgctgccggcgatctggtgcgtttatatccaaatacgcagtccaaaattgaaatcatcccatgcgcgacgtctcgacgatattatcgtgatttatcatcgattcctctgcagcgtattgtcgagcgaaggttgtcggagtttcacaggcattgtcgcaagcgcgatcgccgattaccgcagattacgccgttcaaatattttatatatcacgggacgatcgagccgaagaaaaatgtcaaaacgcttctgctagcctttgactctttggtaaatcaagagcggtttagagagtataagctcatcattgcaggaagatttggttggatgtatgaccaagagcgtacgcatatggcgaaattgatcgagaaaggtgccgtcattcatctcgaggatacaacgaacgatgaactcagggttcttttaagcaacgcattggctcatgtgtttccgtcttattacgaaggttttggtataccgcctgttgaggctttgtcgtgtgggtgtcccactattgtttcgaatgtttcttctctaccggaggttgtagggcgagccgggatcctcgtcagtccgtatgatgcagaatggttggcctcggaaatgggggctgtggcgctggctccagaatcagtacgagagcggatcgaaaaagaatccaaatatgtgttggaacagtacgccgaatcgactgttcgggacaagtggatgagggtaattgaaaagtcgcttagtttgggtgggcgtacagcctcaacgctgatggcggagaattaccgggtcgactcagtgctgtag

SEQ ID NO: 137 - protein, 397 aa, Alicyclobacillus acidocaldarius
MFSNFVWSWLAHALPRAAWLPVLCAVVWTAIFLRTIPDLVRTPRLRPREAARASPPSYGRVSVVVAARDEREHIEVTLESLLRQTYPDLEIVAVDDRSTDGTGDVIDRMAASDSRIVPVHIRELPRGWLGKNHALYAGAMRATGDWLLFADADVRFYPDAVERAMAYVHAHRLHHLTVAPRLIASGYALKLLTAMYIFNYVLFKRPQSAYRRRTRAHAGIGAFNLVSREAYERIGTHRAISLRPDDDLHLGKLIKRHGFRQRFVVAQDMIEIEWYPSFRAMVVGMEKAPLPAFHYSAVLLTAAMMVMMVLYTTPFAGAIFGPGWYRLVYLYCLVLMGILYELHAVFLRLPKHQFLILPLGMLLYSYAFIRSAVLAVRRGGLVWRDTFYTLRELRRGL

SEQ ID NO: 138 - DNA, 1194 bp, Alicyclobacillus acidocaldarius
atgttctccaacttcgtgtggtcctggcttgcgcacgcgcttccgcgggcggcgtggctgcccgtcctgtgcgcggtggtgtggacggccatctttctccgcaccatcccggacctcgtgcgaacgccgcgccttcggccccgtgaggcggcgagagcgagcccaccgtcctatggccgcgtgagcgtcgtggtggcggcgcgcgatgagcgggagcacatcgaggtcacgctcgaatcgctgctgcgccagacgtatccggatctcgaaatcgtcgcggttgacgatcggtcgacggacgggacgggcgacgtgatcgaccggatggcggccagcgattcgcgcattgtgccggtgcacatccgagagctgccgcgtggatggctgggcaagaaccacgccctgtatgcaggcgctatgcgcgcgacgggcgattggctgctgtttgcggacgcggacgtgcggttttacccggacgcggtggaacgggccatggcctacgtgcacgcgcatcggctgcatcacctgaccgtggcgccgaggctcatcgcatccggctacgcgctgaagctattgacggccatgtacatcttcaactatgtgctgttcaagcggccccagagcgcgtaccgcaggcgcactcgcgcacacgccggcatcggcgcgttcaacctcgtcagccgcgaggcgtacgagcgcatcggcacgcatcgagccatcagcttacgtcccgacgacgatctccacctcggcaagctcatcaagcggcatggatttcggcagcgattcgtcgtggcgcaggacatgatcgagatcgagtggtatccgagcttccgcgcgatggtcgtcggcatggagaaagcgccgctgccggcatttcactattccgcggtgcttttgacggcggccatgatggtgatgatggtgctctacacgacgcctttcgcaggggccatcttcggaccgggttggtatcgattggtttatctgtattgtctcgtcctcatgggaatcttatatgaacttcatgcggtgtttttgagactgcccaagcaccagttcctcatcctgccgctcggcatgctgctgtacagctacgccttcattcgttcggccgtgctggcggttcgccgaggagggctcgtgtggcgggacacgttttacacgctgcgcgaactgcgccgaggtctgtga

SEQ ID NO: 139 - protein, 377 aa, Bacillus selenitireducens MLS10
AWITVILWGLVLIDTWIGFRRFPKLDSFRETVLSPADRSGRVSVIVAARNEEDAIYESVKSQLTSTWPGVEWILVNDRSTDATGEKMDELARQDSRIRVVHVRDLPEGWLGKNHAMHCGYEEATGSALLFTDADVMFRPHTIEGAMACKKTTGARHVTMTPEMTVKTFWTQAFVHFFLFGFSYYKRPWKANDDRSKIALGIGAFNLIDREAYEAIGTHRAIRLRPDDDLMLGVRVKAAGMRQRAIDGTGGLSVEWYPSLKEAVKGLEKNTFAGLHYSWLMVLFALSGVFVSQVLPFIGVLFHEGSARWVYLAAVVLMLIIYVKTSFAPWKKALKTFTVFPLSALIFIYTLIRAVLKTVIRGGIEWRGTFYSLKELKK

SEQ ID NO: 140 - protein, 375 aa, Bacillus sp. NRRL B-14911
AILLALCMIIWICAIADAFLGLRRLDQLEEEEELASGPLLSIVTAARNEAAVIEESIRTQLSQNYTHLEWILVNDRSEDGTGEIMERLAQEDARIRVLHIHDLPDGWLGKNHALCRGAGMAKGDIILFTDADVMFRKDAIGRALSYFRRQGLDHLTAAPALKAHSFWLKAFIGFFLFGFSYYKRPWQANRPQSKTGIGIGAFNLISKKAYEDAGTHESIRMRPDDDLMLGMLMKRLGYRQKIAAALELLEVEWYTSLGEAFRGLEKNTFAGLHYRISMVLLAIAGTFISQVVPFFAVFSPDRLVMGLSAANIILLGGLYTMISNRMTPFSSALFLVFPLTALLFIYSIMRASFLTFKRGGIVWRGTKYSLKELRR

SEQ ID NO: 141 - protein, 347 aa, Symbiobacterium thermophilum IAM 14863
PNASLGPNPPPRVSAIVPACNEARSIESAVRSLIRQDYPNLEVVLVNDRSTDGTGAIMDRLAREFPQVTVVHIDRLPAGWLGKNHALWVGARHASGEILLFTDADVHYDPTTVRRAVAFMEQRRLDHLTLAPDLTVRGYWLEAWVGFFVMAFLAYKTPYRANDPRSKVGTGIGAFNMIRRTAYEAIGTHRAISLRPDDDLRLGQRLKRMGHSSHVAMGRGLVSVEWYTSLREAIRGLEKNAFAGLEYNLGTVFASVVGILAIMVWPYVALFLTEGWTLGLYAGAILLQLALYVLANGAGGPRMCQLALAYPVAALLFAYAIARATYLTLRRGGIAWRGTFYPLALLR

SEQ ID NO: 142 - protein, 392 aa, Acidobacteria bacterium Ellin345
IWWHAHWEALVAFAIGLVWLSRLLAASRGMPKLAEISRPEWDLRPDPAPRVSIVVCALNEEGKIEPALRSLLELDYPDYEVVAVDDRSTDRTGEIMDRIAEEYRANAHHHLRVVHVTELPPGWLGKVHAMWSATRVADGDWILFTDADVVFQKETLRRAIAYAERERADHVVLFPTMLMYTWDERMMIAFFQAMFVFGHRPWKTADPKSRDHMGVGAFNLIRRSVYEKIGTYARMKMAVVDDMKLGEIVKKEGYAQRNVFGRDLIQLHWHSGALGVVRGLTKNFFAILRFNPFLTLGVILGMLLFNLTPFVGVFLTHGWARAGYALALASIAGIYYGMSDRSTIPWYYVVLHPVSTVLFAYTVGRSMVVTLAQDGITWRGTHYSLNELRKGV

SEQ ID NO: 143 - protein, 373 aa, Anaeromyxobacter sp. K
ALALAGWARVAWSGLRSDRALARLEDLPAPRSVPRVSVVVPCRDEAPHVERAVRSLLAQDLPGLEVVAVDDRSRDETGAILDRLAAAEPRLAVVHVRELPAGWLGKNHACAAGARRARGEWLLFTDGDVVFGPGALRRAVGHAEALGLGHLAAAPRFVAPGALERAFVAAFAAFAAGAFRVWELPRAGTRGFAGVGAFNLVRRDAYEAVGGHARLRLEVVDDVKLGLLLRRSGVPQGLVNGGALVSVRWQHGFVPSVLGLVKNAFAGAEYRVARALGVALWAVFLGAAPLALALAAHGGAARALGGLALAVSVGVLGVTARRVAGGGGAEGLLMPPCTVLLGAVLLASAAAAAWRGGVVWRGTFYPLAALRQG

SEQ ID NO: 144 - protein, 397 aa, Artificial
  Substituion in SEQ ID NO 137
MFSNFVWSWLAHALPRAAWLPVLCAVVWTAIFLRTIPDLVRTPRLRPREAARASPPSYGRVSVVVAARDEREHIEVTLESLLKQTYPDLEIVAVDDRSTDGTGDVIDRMAASDSRIVPVHIRELPRGWLGKNHALYAGAMRATGDWLLFADADVRFYPDAVERAMAYVHAHRLHHLTVAPRLIASGYALKLLTAMYIFNYVLFKRPQSAYRRRTRAHAGIGAFNLVSREAYERIGTHRAISLRPDDDLHLGKLIKRHGFRQRFVVAQDMIEIEWYPSFRAMVVGMEKAPLPAFHYSAVLLTAAMMVMMVLYTTPFAGAIFGPGWYRLVYLYCLVLMGILYELHAVFLRLPKHQFLILPLGMLLYSYAFIRSAVLAVRRGGLVWRDTFYTLRELRRGL

SEQ ID NO: 145 - protein, 397 aa, Artificial
  Substituion in SEQ ID NO 137
MFSNFVWSWLAHALPRAAWLPVLCAVVWTAIFLRTIPDLVRTPRLRPREAARASPPSYGRVSVVVAARDEREHIEVTLESILRQTYPDLEIVAVDDRSTDGTGDVIDRMAASDSRIVPVHIRELPRGWLGKNHALYAGAMRATGDWLLFADADVRFYPDAVERAMAYVHAHRLHHLTVAPRLIASGYALKLLTAMYIFNYVLFKRPQSAYRRRTRAHAGIGAFNLVSREAYERIGTHRAISLRPDDDLHLGKLIKRHGFRQRFVVAQDMIEIEWYPSFRAMVVGMEKAPLPAFHYSAVLLTAAMMVMMVLYTTPFAGAIFGPGWYRLVYLYCLVLMGILYELHAVFLRLPKHQFLILPLGMLLYSYAFIRSAVLAVRRGGLVWRDTFYTLRELRRGL

SEQ ID NO: 146 - protein, 397 aa, Artificial
  Substituion in SEQ ID NO 137
MFSNFVWSWLAHALPRAAWLPVLCAVVWTAIFLRTIPDLVRTPRLRPREAARASPPSYGRVSVVVAARDEREHIEVTLESLLRQTYPDLEIVAVDDRSTDGTGDVIDRMAASDSRIVPVHIRELPRGWLGKNHALYAGAMRATGDWLLFADADVRFYPDAVERAMAYVHAHRLHHLTVAPRLIASGYALKLLTAMYIFNYVLFKRPQSAYRRKTRAHAGIGAFNLVSREAYERIGTHRAISLRPDDDLHLGKLIKRHGFRQRFVVAQDMIEIEWYPSFRAMVVGMEKAPLPAFHYSAVLLTAAMMVMMVLYTTPFAGAIFGPGWYRLVYLYCLVLMGILYELHAVFLRLPKHQFLILPLGMLLYSYAFIRSAVLAVRRGGLVWRDTFYTLRELRRGL

SEQ ID NO: 147 - protein, 397 aa, Artificial
  Substituion in SEQ ID NO 137
MFSNFVWSWLAHALPRAAWLPVLCAVVWTAIFLRTIPDLVRTPRLRPREAARASPPSYGKVSVVVAARDEREHIEVTLESLLRQTYPDLEIVAVDDRSTDGTGDVIDRMAASDSRIVPVHIRELPRGWLGKNHALYAGAMRATGDWLLFADADVRFYPDAVERAMAYVHAHRLHHLTVAPRLIASGYALKLLTAMYIFNYVLFKRPQSAYRRRTRAHAGIGAFNLVSREAYERIGTHRAISLRPDDDLHLGKLIKRHGFRQRFVVAQDMIEIEWYPSFRAMVVGMEKAPLPAFHYSAVLLTAAMMVMMVLYTTPFAGAIFGPGWYRLVYLYCLVLMGILYELHAVFLRLPKHQFLILPLGMLLYSYAFIRSAVLAVRRGGLVWRDTFYTLRELRRGL

SEQ ID NO: 148 - protein, 397 aa, Artificial
  Substituion in SEQ ID NO 137
MFSNFVWSWLAHALPRAAWLPVICAVVWTAIFLRTIPDLVRTPRLRPREAARASPPSYGRVSVVVAARDEREHIEVTLESLLRQTYPDLEIVAVDDRSTDGTGDVIDRMAASDSRIVPVHIRELPRGWLGKNHALYAGAMRATGDWLLFADADVRFYPDAVERAMAYVHAHRLHHLTVAPRLIASGYALKLLTAMYIFNYVLFKRPQSAYRRRTRAHAGIGAFNLVSREAYERIGTHRAISLRPDDDLHLGKLIKRHGFRQRFVVAQDMIEIEWYPSFRAMVVGMEKAPLPAFHYSAVLLTAAMMVMMVLYTTPFAGAIFGPGWYRLVYLYCLVLMGILYELHAVFLRLPKHQFLILPLGMLLYSYAFIRSAVLAVRRGGLVWRDTFYTLRELRRGL

SEQ ID NO: 149 - DNA, 1194 bp, Artificial
  Substituion in SEQ ID NO 138
atgttctccaacttcgtgtggtcctggcttgcgcacgcgcttccgcgggcggcgtggctgcccgtcctgtgcgcggtggtgtggacggccatctttctccgcaccatcccggacctcgtgcgaacgccgcgccttcggccccgtgaggcggcgagagcgagcccaccgtcctatggccgcgtgagcgtcgtggtggcggcgcgcgatgagcgggagcacatcgaggtcacgctcgaatcgctgctgaaacagacgtatccggatctcgaaatcgtcgcggttgacgatcggtcgacggacgggacgggcgacgtgatcgaccggatggcggccagcgattcgcgcattgtgccggtgcacatccgagagctgccgcgtggatggctgggcaagaaccacgccctgtatgcaggcgctatgcgcgcgacgggcgattggctgctgtttgcggacgcggacgtgcggttttacccggacgcggtggaacgggccatggcctacgtgcacgcgcatcggctgcatcacctgaccgtggcgccgaggctcatcgcatccggctacgcgctgaagctattgacggccatgtacatcttcaactatgtgctgttcaagcggccccagagcgcgtaccgcaggcgcactcgcgcacacgccggcatcggcgcgttcaacctcgtcagccgcgaggcgtacgagcgcatcggcacgcatcgagccatcagcttacgtcccgacgacgatctccacctcggcaagctcatcaagcggcatggatttcggcagcgattcgtcgtggcgcaggacatgatcgagatcgagtggtatccgagcttccgcgcgatggtcgtcggcatggagaaagcgccgctgccggcatttcactattccgcggtgcttttgacggcggccatgatggtgatgatggtgctctacacgacgcctttcgcaggggccatcttcggaccgggttggtatcgattggtttatctgtattgtctcgtcctcatgggaatcttatatgaacttcatgcggtgtttttgagactgcccaagcaccagttcctcatcctgccgctcggcatgctgctgtacagctacgccttcattcgttcggccgtgctggcggttcgccgaggagggctcgtgtggcgggacacgttttacacgctgcgcgaactgcgccgaggtctgtga

SEQ ID NO: 150 - DNA, 1194 bp, Artificial
  Substituion in SEQ ID NO 138
atgttctccaacttcgtgtggtcctggcttgcgcacgcgcttccgcgggcggcgtggctgcccgtcctgtgcgcggtggtgtggacggccatctttctccgcaccatcccggacctcgtgcgaacgccgcgccttcggccccgtgaggcggcgagagcgagcccaccgtcctatggccgcgtgagcgtcgtggtggcggcgcgcgatgagcgggagcacatcgaggtcacgctcgaatcgattctgcgccagacgtatccggatctcgaaatcgtcgcggttgacgatcggtcgacggacgggacgggcgacgtgatcgaccggatggcggccagcgattcgcgcattgtgccggtgcacatccgagagctgccgcgtggatggctgggcaagaaccacgccctgtatgcaggcgctatgcgcgcgacgggcgattggctgctgtttgcggacgcggacgtgcggttttacccggacgcggtggaacgggccatggcctacgtgcacgcgcatcggctgcatcacctgaccgtggcgccgaggctcatcgcatccggctacgcgctgaagctattgacggccatgtacatcttcaactatgtgctgttcaagcggccccagagcgcgtaccgcaggcgcactcgcgcacacgccggcatcggcgcgttcaacctcgtcagccgcgaggcgtacgagcgcatcggcacgcatcgagccatcagcttacgtcccgacgacgatctccacctcggcaagctcatcaagcggcatggatttcggcagcgattcgtcgtggcgcaggacatgatcgagatcgagtggtatccgagcttccgcgcgatggtcgtcggcatggagaaagcgccgctgccggcatttcactattccgcggtgcttttgacggcggccatgatggtgatgatggtgctctacacgacgcctttcgcaggggccatcttcggaccgggttggtatcgattggtttatctgtattgtctcgtcctcatgggaatcttatatgaacttcatgcggtgtttttgagactgcccaagcaccagttcctcatcctgccgctcggcatgctgctgtacagctacgccttcattcgttcggccgtgctggcggttcgccgaggagggctcgtgtggcgggacacgttttacacgctgcgcgaactgcgccgaggtctgtga

SEQ ID NO: 151 - DNA, 1194 bp, Artificial
  Substituion in SEQ ID NO 138
atgttctccaacttcgtgtggtcctggcttgcgcacgcgcttccgcgggcggcgtggctgcccgtcctgtgcgcggtggtgtggacggccatctttctccgcaccatcccggacctcgtgcgaacgccgcgccttcggccccgtgaggcggcgagagcgagcccaccgtcctatggccgcgtgagcgtcgtggtggcggcgcgcgatgagcgggagcacatcgaggtcacgctcgaatcgctgctgcgccagacgtatccggatctcgaaatcgtcgcggttgacgatcggtcgacggacgggacgggcgacgtgatcgaccggatggcggccagcgattcgcgcattgtgccggtgcacatccgagagctgccgcgtggatggctgggcaagaaccacgccctgtatgcaggcgctatgcgcgcgacgggcgattggctgctgtttgcggacgcggacgtgcggttttacccggacgcggtggaacgggccatggcctacgtgcacgcgcatcggctgcatcacctgaccgtggcgccgaggctcatcgcatccggctacgcgctgaagctattgacggccatgtacatcttcaactatgtgctgttcaagcggccccagagcgcgtaccgcaggaaaactcgcgcacacgccggcatcggcgcgttcaacctcgtcagccgcgaggcgtacgagcgcatcggcacgcatcgagccatcagcttacgtcccgacgacgatctccacctcggcaagctcatcaagcggcatggatttcggcagcgattcgtcgtggcgcaggacatgatcgagatcgagtggtatccgagcttccgcgcgatggtcgtcggcatggagaaagcgccgctgccggcatttcactattccgcggtgcttttgacggcggccatgatggtgatgatggtgctctacacgacgcctttcgcaggggccatcttcggaccgggttggtatcgattggtttatctgtattgtctcgtcctcatgggaatcttatatgaacttcatgcggtgtttttgagactgcccaagcaccagttcctcatcctgccgctcggcatgctgctgtacagctacgccttcattcgttcggccgtgctggcggttcgccgaggagggctcgtgtggcgggacacgttttacacgctgcgcgaactgcgccgaggtctgtga

SEQ ID NO: 152 - DNA, 1194 bp, Artificial
  Substituion in SEQ ID NO 138
atgttctccaacttcgtgtggtcctggcttgcgcacgcgcttccgcgggcggcgtggctgcccgtcctgtgcgcggtggtgtggacggccatctttctccgcaccatcccggacctcgtgcgaacgccgcgccttcggccccgtgaggcggcgagagcgagcccaccgtcctatggcaaagtgagcgtcgtggtggcggcgcgcgatgagcgggagcacatcgaggtcacgctcgaatcgctgctgcgccagacgtatccggatctcgaaatcgtcgcggttgacgatcggtcgacggacgggacgggcgacgtgatcgaccggatggcggccagcgattcgcgcattgtgccggtgcacatccgagagctgccgcgtggatggctgggcaagaaccacgccctgtatgcaggcgctatgcgcgcgacgggcgattggctgctgtttgcggacgcggacgtgcggttttacccggacgcggtggaacgggccatggcctacgtgcacgcgcatcggctgcatcacctgaccgtggcgccgaggctcatcgcatccggctacgcgctgaagctattgacggccatgtacatcttcaactatgtgctgttcaagcggccccagagcgcgtaccgcaggcgcactcgcgcacacgccggcatcggcgcgttcaacctcgtcagccgcgaggcgtacgagcgcatcggcacgcatcgagccatcagcttacgtcccgacgacgatctccacctcggcaagctcatcaagcggcatggatttcggcagcgattcgtcgtggcgcaggacatgatcgagatcgagtggtatccgagcttccgcgcgatggtcgtcggcatggagaaagcgccgctgccggcatttcactattccgcggtgcttttgacggcggccatgatggtgatgatggtgctctacacgacgcctttcgcaggggccatcttcggaccgggttggtatcgattggtttatctgtattgtctcgtcctcatgggaatcttatatgaacttcatgcggtgtttttgagactgcccaagcaccagttcctcatcctgccgctcggcatgctgctgtacagctacgccttcattcgttcggccgtgctggcggttcgccgaggagggctcgtgtggcgggacacgttttacacgctgcgcgaactgcgccgaggtctgtga

SEQ ID NO: 153 - DNA, 1194 bp, Artificial
  Substituion in SEQ ID NO 138
atgttctccaacttcgtgtggtcctggcttgcgcacgcgcttccgcgggcggcgtggctgcccgtcatttgcgcggtggtgtggacggccatctttctccgcaccatcccggacctcgtgcgaacgccgcgccttcggccccgtgaggcggcgagagcgagcccaccgtcctatggccgcgtgagcgtcgtggtggcggcgcgcgatgagcgggagcacatcgaggtcacgctcgaatcgctgctgcgccagacgtatccggatctcgaaatcgtcgcggttgacgatcggtcgacggacgggacgggcgacgtgatcgaccggatggcggccagcgattcgcgcattgtgccggtgcacatccgagagctgccgcgtggatggctgggcaagaaccacgccctgtatgcaggcgctatgcgcgcgacgggcgattggctgctgtttgcggacgcggacgtgcggttttacccggacgcggtggaacgggccatggcctacgtgcacgcgcatcggctgcatcacctgaccgtggcgccgaggctcatcgcatccggctacgcgctgaagctattgacggccatgtacatcttcaactatgtgctgttcaagcggccccagagcgcgtaccgcaggcgcactcgcgcacacgccggcatcggcgcgttcaacctcgtcagccgcgaggcgtacgagcgcatcggcacgcatcgagccatcagcttacgtcccgacgacgatctccacctcggcaagctcatcaagcggcatggatttcggcagcgattcgtcgtggcgcaggacatgatcgagatcgagtggtatccgagcttccgcgcgatggtcgtcggcatggagaaagcgccgctgccggcatttcactattccgcggtgcttttgacggcggccatgatggtgatgatggtgctctacacgacgcctttcgcaggggccatcttcggaccgggttggtatcgattggtttatctgtattgtctcgtcctcatgggaatcttatatgaacttcatgcggtgtttttgagactgcccaagcaccagttcctcatcctgccgctcggcatgctgctgtacagctacgccttcattcgttcggccgtgctggcggttcgccgaggagggctcgtgtggcgggacacgttttacacgctgcgcgaactgcgccgaggtctgtga

SEQ ID NO: 154 - protein, 470 aa, Alicyclobacillus acidocaldarius
MNFANEKFRLSLGHVPSEMHCAQHIRIEARGAVREFARSGAGTRPDRRGGSSSPVRSKRRMVHSFLFLYPFVMSIVWMVGGCVYAWRRERHPFAESPDLPETPFVSILIPCHNEGDVLEDTIGRMLQLDYPAYEIVALNDGSTDDTRAVLERMAACDARVRVVNLPVQRGKARALNAGLVASRGEILVTVDADAVLAKDALRFLVWHFVAPGSERVGAVTGNPRIRNRGTLLGKIQVLEYASIIGLIKRAQRVLGKIMTVSGVIAAFRKRALVDCGMWDEDMVTDDIAVSWKLERRAWDIRYEPRALCFMWAPERLRSLIRQRARWAQGGVEVLIRNASVLWTWKNRRMIPLYVEELLGIAWAYLWVVSLVWTLAFDVAHGIPWTYVAETGTWLGLTSLVQTSVALWIEQRYERDSLWRYYFYAIWYPAAYWMIGAFVVVWAVPKACWAMWAARRGRYATWKSPDRGVSA

SEQ ID NO: 155 - DNA, 1413 bp, Alicyclobacillus acidocaldarius
ttgaacttcgctaatgaaaaatttaggctgtcgcttgggcatgtgccgtcggaaatgcattgcgcacaacatattcgtatcgaagctcgcggagcggtccgcgagttcgcgcgatccggcgcagggactcggccggatcgccgcggtggaagctcgagtccagtgaggagcaaacggcgcatggtgcattcttttctgttcctgtatccctttgtcatgagcatcgtctggatggtgggcggctgtgtctatgcctggcggcgcgaacgccaccccttcgccgaatccccggacctccccgagacgccgtttgtttccatcctcatcccctgccacaacgaaggggatgtgctcgaagacaccatcggccggatgcttcagttggattatccggcgtacgaaattgtcgcactgaacgacggcagcacggacgacacgcgcgcggtgctcgaacgcatggcggcctgcgatgcgcgagttcgcgtggtcaacctgcccgttcagcgcggaaaggcgcgcgcgctgaacgctgggcttgtcgcgtcccgaggcgagatcctcgtgaccgtggacgcggacgccgtgttggcgaaggacgcgcttcgcttcctcgtctggcacttcgtggccccgggcagcgagcgcgtcggtgccgtgacgggcaacccgcgcattcgaaatcgcggtacgctgctcggaaagattcaggtgctggagtacgcgagcatcatcgggctcatcaagcgcgcgcagcgcgtgctcggcaagatcatgacggtctcgggcgtgattgcggcctttcgcaagagggccctcgtggactgcggcatgtgggacgaggacatggtgacggatgacatcgcggtgtcctggaagctcgagcggcgagcctgggacatccgatacgagccgcgagcgctctgcttcatgtgggcgcccgagcgcctgcggagcctcatccgccagcgcgctcgctgggcgcagggcggcgtggaggtcctcatccgcaacgcctcggtcctctggacctggaagaatcggcgcatgatcccgctctatgtggaagagctcctgggcatcgcctgggcgtacctttgggttgtgagcctcgtgtggaccctcgcatttgacgtggcgcacggcattccctggacgtacgtggcggagacggggacgtggctcggcctgacatcgttagtgcagacctcggtcgccctttggattgagcagcgatacgagcgcgactcgctctggcgctactatttctatgccatctggtatccggccgcgtattggatgatcggcgcgttcgtcgtggtctgggcggtgccgaaggcgtgctgggccatgtgggcggctcggcgcgggcggtacgccacgtggaaaagcccggatcggggggtgtcggcatga

SEQ ID NO: 156 - protein, 401 aa, Thermosinus carboxydivorans Nor1
FVFYYPLVMSIVWIVGAFYFYLRREAGRRRRPPVLAEYPLVSVLIPAHNEEQSIRATIASVLKSNYPNFEIVVVDDGSTDATPRILLELAAECPAVRVLIMKQNMGKPSALRYGLMACRGEIILAMDADAFLDANAMRWLVAHFVAGPRVGAVTGNPRVRNRTSLIAKIQVGEYSSIIGMIKRTQRILGKVLTVSGVIAAFRKRALLDVGLWDIDMITDDINVTWKLEKHFWDVRYEPNALCWILVPETLKGLWRQRVRWAQGGVEVIRRHAGIWTDWRQRRLWPVYIEYVISVCWSYAFVSFGGLWLLNFIFPHDLPVAKIFPEWKGAVLVSLCLVQSAIALWIDRRYEKNILWYYFWVIWYPFVYWVISALATVWAAPRALFGHSKGKLAVWQSPDRGL

SEQ ID NO: 157 - protein, 410 aa, Stenotrophomonas maltophilia R551-3
QVLFQFAFYYPMVMAFFWMSGGLYYYFRRERHSRPRNDPPLMIDPPFASLLIPCHNESENLDDTLGAALAQRYPADYEVIAIDDGSSDDTGARLDALAAKHPRLRVLHLDRNLGKANALRMGALAARSEYLVCIDGDAMLEEHALHWMIWHLVSGSRVGAVTGNPRIRNRSTLLGRLQVAEFSSIIGMIKRAQRVYGRIFTISGVIAGFRRTALHQVGWWSDDMVTEDIDISWRLQRAHWDIRYEPNALCFILMPETLKGLWRQRLRWAQGGVEVMLRHARSLLHWKERRMWGVLLEYVLSVVWAYTMLFIVVLWALGKFIEMPPQLYIASLLAQWHGVILALVCLLQFASSLIIDRRYETQIGRNYFWVIWYPMAYWLISLSTTLVALPKTLLRRRSKRATWTSPDRGI

SEQ ID NO: 158 - protein, 404 aa, Xanthomonas oryzae pv. oryzae KACC10331
FAFFYPIMMAFFWISGGLYYFLRRERKSRPRNDPPPMGHYPSASLLIPCHNESDNLDDTIGNALAQRYPDFEVIAINDGSRDDTGARLDILAARHPRLRVIHLDRNLGKANALRMGALAARSEYLICIDGDAMLEEFAMHWMVWHLSSSPRVGAVTGNPRIRNRSTLLGRLQVAEFSSIIGMIKRAQRVYGRIFTVSGVIAGFRRTALHRIGYWADDMMTEDIDISWRLQLDHWDIRYEPNALCFILMPETLKGLWRQRLRWAQGGVEVLLRHGRSLFSWRKRRMWGVLLEYILSVLWAYSIVLIAVLWAPRQFFALPTAVSIHGLLPQWHGAAMVLVCLLQFASSLIIDRRYEKGIGRNYFWVIWYPIAYWLLSLCTTVVALPKTLLTRRGKRAIWVSPDRGI

SEQ ID NO: 159 - protein, 404 aa, Xanthomonas oryzae pv. oryzae MAFF 311018; identical to SEQ ID NO: 158

SEQ ID NO: 160 - protein, 404 aa, Xanthomonas oryzae pv. oryzicola BLS256
FAFFYPIMMAFFWISGGLYYFLRRERKSRPRNNPPPMGHYPSASLLIPCHNESENLDDTIGSALAQRYPDFEVIAINDGSRDDTGARLDILAARHPRLRVIHLDRNLGKANALRMGALAARSEYLICIDGDAMLGEFAMHWMVWHLSSSPRVGAVTGNPRIRNRSTLLGRLQVAEFSSIIGMIKRAQRVYGRIFTVSGVIAGFRRTALHRIGYWADDMMTEDIDISWRLQLDHWDIRYEPNALCFILMPETLKGLWRQRLRWAQGGVEVLLRHGRSLFSWRKRRMWGVLLEYILSVLWAYSIVLIAVLWAPRQFFALPTALSIHGLLPQWHGAAMVLVCLLQFASSLIIDRRYEKGIGRNYFWVIWYPIAYWLLSLCTTVVALPKTLLTRRGKRAIWVSPDRGI

SEQ ID NO: 161 - protein, 470 aa, Artificial
  Substituion in SEQ ID NO 154
MNFANEKFRLSLGHVPSEMHCAQHIRIEARGAVREFARSGAGTRPDRRGGSSSPVRSKRRMVHSFLFLYPFVMSIVWMVGGCVYAWRRERHPFADSPDLPETPFVSILIPCHNEGDVLEDTIGRMLQLDYPAYEIVALNDGSTDDTRAVLERMAACDARVRVVNLPVQRGKARALNAGLVASRGEILVTVDADAVLAKDALRFLVWHFVAPGSERVGAVTGNPRIRNRGTLLGKIQVLEYASIIGLIKRAQRVLGKIMTVSGVIAAFRKRALVDCGMWDEDMVTDDIAVSWKLERRAWDIRYEPRALCFMWAPERLRSLIRQRARWAQGGVEVLIRNASVLWTWKNRRMIPLYVEELLGIAWAYLWVVSLVWTLAFDVAHGIPWTYVAETGTWLGLTSLVQTSVALWIEQRYERDSLWRYYFYAIWYPAAYWMIGAFVVVWAVPKACWAMWAARRGRYATWKSPDRGVSA

SEQ ID NO: 162 - protein, 470 aa, Artificial
  Substituion in SEQ ID NO 154
MNFANEKFRLSLGHVPSEMHCAQHIRIEARGAVREFARSGAGTRPDRRGGSSSPVRSKRRMVHSFLFLYPFVMSIVWMVGGCVYAWRRERHPFAESPDLPETPFVSILIPCHNEGDVLEDTIGRMLQLDYPAYEIVALNDGSTDDTRAVLERMAACDARVRVVNLPVQRGKARALNAGLVASRGEILVTVDADAVLAKDALRFLVWHFVAPGSERVGAVTGNPRIRNRGTLLGKIQVLEYASIIGLIKRAQRVLGKIMTVSGVIAAFRKRALVDCGMWDEDMVTDDIAVSWKLERRAWDIRYEPRALCFMWAPERLRSLIRQRARWAQGGVEVLIRNASVLWTWKNRRMIPLYVEELLGIAWAYLWVISLVWTLAFDVAHGIPWTYVAETGTWLGLTSLVQTSVALWIEQRYERDSLWRYYFYAIWYPAAYWMIGAFVVVWAVPKACWAMWAARRGRYATWKSPDRGVSA

SEQ ID NO: 163 - protein, 470 aa, Artificial
  Substituion in SEQ ID NO 154
MNFANEKFRLSLGHVPSEMHCAQHIRIEARGAVREFARSGAGTKPDRRGGSSSPVRSKRRMVHSFLFLYPFVMSIVWMVGGCVYAWRRERHPFAESPDLPETPFVSILIPCHNEGDVLEDTIGRMLQLDYPAYEIVALNDGSTDDTRAVLERMAACDARVRVVNLPVQRGKARALNAGLVASRGEILVTVDADAVLAKDALRFLVWHFVAPGSERVGAVTGNPRIRNRGTLLGKIQVLEYASIIGLIKRAQRVLGKIMTVSGVIAAFRKRALVDCGMWDEDMVTDDIAVSWKLERRAWDIRYEPRALCFMWAPERLRSLIRQRARWAQGGVEVLIRNASVLWTWKNRRMIPLYVEELLGIAWAYLWVVSLVWTLAFDVAHGIPWTYVAETGTWLGLTSLVQTSVALWIEQRYERDSLWRYYFYAIWYPAAYWMIGAFVVVWAVPKACWAMWAARRGRYATWKSPDRGVSA

SEQ ID NO: 164 - protein, 470 aa, Artificial
  Substituion in SEQ ID NO 154
MNFANEKFRLSLGHVPSEMHCAQHIRIEARGAVREFARSGAGTRPDRRGGSSSPVRSKRRMVHSFLFLYPFVMSIVWMVGGCVYAWRRERHPFAESPDLPETPFVSILIPCHNEGDVLEDTIGRMLQLDYPAYEIVALNDGSTDDTRAVLERMAACDARVRVVNLPVQRGKARALNAGLVASRGEILVTVDADAVLAKDALRFLVWHFVAPGSERVGAVTGNPRIRNRGTLLGKIQVLEYASIIGLIKRAQRVLGKIMTVSGVIAAFRKRALVDCGMWDEDMVTDDIAVSWKLERRAWDIRYEPRALCFMWAPERLRSLIRQRARWAQGGVEVLIRNASVLWTWKNRRMIPLYVEELLGIAWAYLWVVSLVWTLAFDVAHGIPWTYVAETGTWLGLTSLVQTSVALWIEQRYERESLWRYYFYAIWYPAAYWMIGAFVVVWAVPKACWAMWAARRGRYATWKSPDRGVSA

SEQ ID NO: 165 - protein, 470 aa, Artificial
  Substituion in SEQ ID NO 154
MQFANEKFRLSLGHVPSEMHCAQHIRIEARGAVREFARSGAGTRPDRRGGSSSPVRSKRRMVHSFLFLYPFVMSIVWMVGGCVYAWRRERHPFAESPDLPETPFVSILIPCHNEGDVLEDTIGRMLQLDYPAYEIVALNDGSTDDTRAVLERMAACDARVRVVNLPVQRGKARALNAGLVASRGEILVTVDADAVLAKDALRFLVWHFVAPGSERVGAVTGNPRIRNRGTLLGKIQVLEYASIIGLIKRAQRVLGKIMTVSGVIAAFRKRALVDCGMWDEDMVTDDIAVSWKLERRAWDIRYEPRALCFMWAPERLRSLIRQRARWAQGGVEVLIRNASVLWTWKNRRMIPLYVEELLGIAWAYLWVVSLVWTLAFDVAHGIPWTYVAETGTWLGLTSLVQTSVALWIEQRYERDSLWRYYFYAIWYPAAYWMIGAFVVVWAVPKACWAMWAARRGRYATWKSPDRGVSA

SEQ ID NO: 166 - DNA, 1413 bp, Artificial
  Substituion in SEQ ID NO 155
ttgaacttcgctaatgaaaaatttaggctgtcgcttgggcatgtgccgtcggaaatgcattgcgcacaacatattcgtatcgaagctcgcggagcggtccgcgagttcgcgcgatccggcgcagggactcggccggatcgccgcggtggaagctcgagtccagtgaggagcaaacggcgcatggtgcattcttttctgttcctgtatccctttgtcatgagcatcgtctggatggtgggcggctgtgtctatgcctggcggcgcgaacgccaccccttcgccgattccccggacctccccgagacgccgtttgtttccatcctcatcccctgccacaacgaaggggatgtgctcgaagacaccatcggccggatgcttcagttggattatccggcgtacgaaattgtcgcactgaacgacggcagcacggacgacacgcgcgcggtgctcgaacgcatggcggcctgcgatgcgcgagttcgcgtggtcaacctgcccgttcagcgcggaaaggcgcgcgcgctgaacgctgggcttgtcgcgtcccgaggcgagatcctcgtgaccgtggacgcggacgccgtgttggcgaaggacgcgcttcgcttcctcgtctggcacttcgtggccccgggcagcgagcgcgtcggtgccgtgacgggcaacccgcgcattcgaaatcgcggtacgctgctcggaaagattcaggtgctggagtacgcgagcatcatcgggctcatcaagcgcgcgcagcgcgtgctcggcaagatcatgacggtctcgggcgtgattgcggcctttcgcaagagggccctcgtggactgcggcatgtgggacgaggacatggtgacggatgacatcgcggtgtcctggaagctcgagcggcgagcctgggacatccgatacgagccgcgagcgctctgcttcatgtgggcgcccgagcgcctgcggagcctcatccgccagcgcgctcgctgggcgcagggcggcgtggaggtcctcatccgcaacgcctcggtcctctggacctggaagaatcggcgcatgatcccgctctatgtggaagagctcctgggcatcgcctgggcgtacctttgggttgtgagcctcgtgtggaccctcgcatttgacgtggcgcacggcattccctggacgtacgtggcggagacggggacgtggctcggcctgacatcgttagtgcagacctcggtcgccctttggattgagcagcgatacgagcgcgactcgctctggcgctactatttctatgccatctggtatccggccgcgtattggatgatcggcgcgttcgtcgtggtctgggcggtgccgaaggcgtgctgggccatgtgggcggctcggcgcgggcggtacgccacgtggaaaagcccggatcggggggtgtcggcatga

SEQ ID NO: 167 - DNA, 1413 bp, Artificial
  Substituion in SEQ ID NO 155
ttgaacttcgctaatgaaaaatttaggctgtcgcttgggcatgtgccgtcggaaatgcattgcgcacaacatattcgtatcgaagctcgcggagcggtccgcgagttcgcgcgatccggcgcagggactcggccggatcgccgcggtggaagctcgagtccagtgaggagcaaacggcgcatggtgcattcttttctgttcctgtatccctttgtcatgagcatcgtctggatggtgggcggctgtgtctatgcctggcggcgcgaacgccaccccttcgccgaatccccggacctccccgagacgccgtttgtttccatcctcatcccctgccacaacgaaggggatgtgctcgaagacaccatcggccggatgcttcagttggattatccggcgtacgaaattgtcgcactgaacgacggcagcacggacgacacgcgcgcggtgctcgaacgcatggcggcctgcgatgcgcgagttcgcgtggtcaacctgcccgttcagcgcggaaaggcgcgcgcgctgaacgctgggcttgtcgcgtcccgaggcgagatcctcgtgaccgtggacgcggacgccgtgttggcgaaggacgcgcttcgcttcctcgtctggcacttcgtggccccgggcagcgagcgcgtcggtgccgtgacgggcaacccgcgcattcgaaatcgcggtacgctgctcggaaagattcaggtgctggagtacgcgagcatcatcgggctcatcaagcgcgcgcagcgcgtgctcggcaagatcatgacggtctcgggcgtgattgcggcctttcgcaagagggccctcgtggactgcggcatgtgggacgaggacatggtgacggatgacatcgcggtgtcctggaagctcgagcggcgagcctgggacatccgatacgagccgcgagcgctctgcttcatgtgggcgcccgagcgcctgcggagcctcatccgccagcgcgctcgctgggcgcagggcggcgtggaggtcctcatccgcaacgcctcggtcctctggacctggaagaatcggcgcatgatcccgctctatgtggaagagctcctgggcatcgcctgggcgtacctttgggttattagcctcgtgtggaccctcgcatttgacgtggcgcacggcattccctggacgtacgtggcggagacggggacgtggctcggcctgacatcgttagtgcagacctcggtcgccctttggattgagcagcgatacgagcgcgactcgctctggcgctactatttctatgccatctggtatccggccgcgtattggatgatcggcgcgttcgtcgtggtctgggcggtgccgaaggcgtgctgggccatgtgggcggctcggcgcgggcggtacgccacgtggaaaagcccggatcggggggtgtcggcatga

SEQ ID NO: 168 - DNA, 1413 bp, Artificial
  Substituion in SEQ ID NO 155
ttgaacttcgctaatgaaaaatttaggctgtcgcttgggcatgtgccgtcggaaatgcattgcgcacaacatattcgtatcgaagctcgcggagcggtccgcgagttcgcgcgatccggcgcagggactaaaccggatcgccgcggtggaagctcgagtccagtgaggagcaaacggcgcatggtgcattcttttctgttcctgtatccctttgtcatgagcatcgtctggatggtgggcggctgtgtctatgcctggcggcgcgaacgccaccccttcgccgaatccccggacctccccgagacgccgtttgtttccatcctcatcccctgccacaacgaaggggatgtgctcgaagacaccatcggccggatgcttcagttggattatccggcgtacgaaattgtcgcactgaacgacggcagcacggacgacacgcgcgcggtgctcgaacgcatggcggcctgcgatgcgcgagttcgcgtggtcaacctgcccgttcagcgcggaaaggcgcgcgcgctgaacgctgggcttgtcgcgtcccgaggcgagatcctcgtgaccgtggacgcggacgccgtgttggcgaaggacgcgcttcgcttcctcgtctggcacttcgtggccccgggcagcgagcgcgtcggtgccgtgacgggcaacccgcgcattcgaaatcgcggtacgctgctcggaaagattcaggtgctggagtacgcgagcatcatcgggctcatcaagcgcgcgcagcgcgtgctcggcaagatcatgacggtctcgggcgtgattgcggcctttcgcaagagggccctcgtggactgcggcatgtgggacgaggacatggtgacggatgacatcgcggtgtcctggaagctcgagcggcgagcctgggacatccgatacgagccgcgagcgctctgcttcatgtgggcgcccgagcgcctgcggagcctcatccgccagcgcgctcgctgggcgcagggcggcgtggaggtcctcatccgcaacgcctcggtcctctggacctggaagaatcggcgcatgatcccgctctatgtggaagagctcctgggcatcgcctgggcgtacctttgggttgtgagcctcgtgtggaccctcgcatttgacgtggcgcacggcattccctggacgtacgtggcggagacggggacgtggctcggcctgacatcgttagtgcagacctcggtcgccctttggattgagcagcgatacgagcgcgactcgctctggcgctactatttctatgccatctggtatccggccgcgtattggatgatcggcgcgttcgtcgtggtctgggcggtgccgaaggcgtgctgggccatgtgggcggctcggcgcgggcggtacgccacgtggaaaagcccggatcggggggtgtcggcatga

SEQ ID NO: 169 - DNA, 1413 bp, Artificial
  Substituion in SEQ ID NO 155
ttgaacttcgctaatgaaaaatttaggctgtcgcttgggcatgtgccgtcggaaatgcattgcgcacaacatattcgtatcgaagctcgcggagcggtccgcgagttcgcgcgatccggcgcagggactcggccggatcgccgcggtggaagctcgagtccagtgaggagcaaacggcgcatggtgcattcttttctgttcctgtatccctttgtcatgagcatcgtctggatggtgggcggctgtgtctatgcctggcggcgcgaacgccaccccttcgccgaatccccggacctccccgagacgccgtttgtttccatcctcatcccctgccacaacgaaggggatgtgctcgaagacaccatcggccggatgcttcagttggattatccggcgtacgaaattgtcgcactgaacgacggcagcacggacgacacgcgcgcggtgctcgaacgcatggcggcctgcgatgcgcgagttcgcgtggtcaacctgcccgttcagcgcggaaaggcgcgcgcgctgaacgctgggcttgtcgcgtcccgaggcgagatcctcgtgaccgtggacgcggacgccgtgttggcgaaggacgcgcttcgcttcctcgtctggcacttcgtggccccgggcagcgagcgcgtcggtgccgtgacgggcaacccgcgcattcgaaatcgcggtacgctgctcggaaagattcaggtgctggagtacgcgagcatcatcgggctcatcaagcgcgcgcagcgcgtgctcggcaagatcatgacggtctcgggcgtgattgcggcctttcgcaagagggccctcgtggactgcggcatgtgggacgaggacatggtgacggatgacatcgcggtgtcctggaagctcgagcggcgagcctgggacatccgatacgagccgcgagcgctctgcttcatgtgggcgcccgagcgcctgcggagcctcatccgccagcgcgctcgctgggcgcagggcggcgtggaggtcctcatccgcaacgcctcggtcctctggacctggaagaatcggcgcatgatcccgctctatgtggaagagctcctgggcatcgcctgggcgtacctttgggttgtgagcctcgtgtggaccctcgcatttgacgtggcgcacggcattccctggacgtacgtggcggagacggggacgtggctcggcctgacatcgttagtgcagacctcggtcgccctttggattgagcagcgatacgagcgcgaatcgctctggcgctactatttctatgccatctggtatccggccgcgtattggatgatcggcgcgttcgtcgtggtctgggcggtgccgaaggcgtgctgggccatgtgggcggctcggcgcgggcggtacgccacgtggaaaagcccggatcggggggtgtcggcatga

SEQ ID NO: 170 - DNA, 1413 bp, Artificial
  Substituion in SEQ ID NO 155
ttgcaattcgctaatgaaaaatttaggctgtcgcttgggcatgtgccgtcggaaatgcattgcgcacaacatattcgtatcgaagctcgcggagcggtccgcgagttcgcgcgatccggcgcagggactcggccggatcgccgcggtggaagctcgagtccagtgaggagcaaacggcgcatggtgcattcttttctgttcctgtatccctttgtcatgagcatcgtctggatggtgggcggctgtgtctatgcctggcggcgcgaacgccaccccttcgccgaatccccggacctccccgagacgccgtttgtttccatcctcatcccctgccacaacgaaggggatgtgctcgaagacaccatcggccggatgcttcagttggattatccggcgtacgaaattgtcgcactgaacgacggcagcacggacgacacgcgcgcggtgctcgaacgcatggcggcctgcgatgcgcgagttcgcgtggtcaacctgcccgttcagcgcggaaaggcgcgcgcgctgaacgctgggcttgtcgcgtcccgaggcgagatcctcgtgaccgtggacgcggacgccgtgttggcgaaggacgcgcttcgcttcctcgtctggcacttcgtggccccgggcagcgagcgcgtcggtgccgtgacgggcaacccgcgcattcgaaatcgcggtacgctgctcggaaagattcaggtgctggagtacgcgagcatcatcgggctcatcaagcgcgcgcagcgcgtgctcggcaagatcatgacggtctcgggcgtgattgcggcctttcgcaagagggccctcgtggactgcggcatgtgggacgaggacatggtgacggatgacatcgcggtgtcctggaagctcgagcggcgagcctgggacatccgatacgagccgcgagcgctctgcttcatgtgggcgcccgagcgcctgcggagcctcatccgccagcgcgctcgctgggcgcagggcggcgtggaggtcctcatccgcaacgcctcggtcctctggacctggaagaatcggcgcatgatcccgctctatgtggaagagctcctgggcatcgcctgggcgtacctttgggttgtgagcctcgtgtggaccctcgcatttgacgtggcgcacggcattccctggacgtacgtggcggagacggggacgtggctcggcctgacatcgttagtgcagacctcggtcgccctttggattgagcagcgatacgagcgcgactcgctctggcgctactatttctatgccatctggtatccggccgcgtattggatgatcggcgcgttcgtcgtggtctgggcggtgccgaaggcgtgctgggccatgtgggcggctcggcgcgggcggtacgccacgtggaaaagcccggatcggggggtgtcggcatga

SEQ ID NO: 171 - protein, 366 aa, Alicyclobacillus acidocaldarius
MSAKTENTWSLCMIVKDEEAVLDRCLQSIADIVDEIVIVDTGSQDRTQEIARKYTDLVFDFEWVDDFSEARNESFRHASMDYVLWLDADDVVSDVDRIKLAEFKKNLSSDVDAVTMWYHLAFQGDQPTVSSRLVRLVKRSRGFVWRGRVHEYLEINGNILNSDIAIIHRPVEHDAARNLRIYEKKLALGEDFSPRDMLYYANELLDHAQYEKAVQWYKRFLATGQCWKEDAITACFKLAECFRAMNQPEQSKQAVLHSFLYDTPRAEACCRIGYGYLEEGKIDQAIFWYDLATKCRRPANFVGFVNHACETWLPHIQLCVCYSRLGQYRKAYDHNERAAEYLGEDPMIVHNRSVLRAWMDGELEKP

SEQ ID NO: 172 - DNA, 1101 bp, Alicyclobacillus acidocaldarius
gtgtccgctaaaacggaaaatacttggagcttatgtatgatcgtgaaagatgaggaggctgtactggatcgctgtctccaatcgattgccgacattgtcgatgaaatcgtgatagttgatacaggttcgcaagacaggacccaagagatcgctcgcaaatacacagatctggtgttcgattttgagtgggtggatgatttcagcgaggcgcgcaacgaatcgttccggcacgccagtatggattacgtcctctggctagacgccgacgacgttgtgtcagatgtagatcgaatcaaactggcagaattcaagaaaaacctttcttccgacgtggacgcagtgacaatgtggtatcacctcgcatttcaaggtgatcagccgaccgtcagttctcgtctcgttcgcctcgtgaaacgatcgcgcggttttgtttggcggggccgcgtccatgaatatcttgaaattaacggcaacatcctcaacagcgacatcgcaatcatccatcgccctgtcgagcatgatgccgctcgcaatcttcgcatctacgagaagaagctcgcgcttggcgaagatttcagcccacgcgacatgctctactacgccaatgagctgctggatcatgcacaatacgagaaggctgtacaatggtacaagcggtttttagcaacaggacaatgttggaaagaggacgccatcacagcttgcttcaagctcgccgaatgctttcgtgcgatgaatcaaccggagcaaagtaagcaagctgtgttacactcgttcctgtacgatacgccgcgagccgaagcgtgttgtcgtatcgggtatggttacttggaagagggaaagatcgatcaggccatcttttggtatgatctagcaaccaaatgcaggcgtccagccaattttgtgggatttgtcaaccatgcatgtgaaacctggttaccccatattcaactttgtgtgtgttatagccggctcggccaatacaggaaagcttatgatcataacgaacgagccgcggagtacctaggtgaagatccgatgatcgtccacaatcgttctgtattgcgagcctggatggatggcgaactcgagaaaccgtaa

SEQ ID NO: 173 - protein, 356 aa, Geobacillus kaustophilus HTA426
TISLCMIVKNEEDVLARCLDSVQHLVDEIVIVDTGSTDRTKEIARSYTARVIDFPWSDDFSAARNFSFSHATMDYIFWLDADDILPAEEQTKFLTLKRTLSSDIDSVTMIYSLAQDEYGKTISSVRRNRLVKRSSGFRWHGMVHEYLEVWGTILNSDITIIHQPNRCASDRNLQIYEKQLAQGKEFSPRDLFYFANELFDHQQYERAIQYYEQFLQTKKGWVEDCIAACGKVADCFDALGDEEQALRYALRSFEYDTPRAECCCRLGYYFLQRKQYRLAAFWYHLATQLTMPSDSWGFVHHACWTWLPHLQLCVCYFYMGEYELAYQHNEKAKQYVPHHPAVLHNECLLQSILAAE

SEQ ID NO: 174 - protein, 347 aa, Desulfitobacterium hafniense Y51
SLCMIVRNEEKTIARCLDSVCDIADEIIIVDTGSTDRTKEIVARYTDKIFDFAWIDDFAAARNYAFSLGTKEYLLWLDADDVILESDRLKFHNLKKNLNPSIDVVNMHYLLAFDSSENPTFTLRRNRLVRRGKNFRWKGAVHEYLEVSGNIMNSDIAIAHKSEEHDSERNLRIYEKRLEQGEEFSPRDLYYFANELYDHKQYEKAVEYYEKFLNTEKGWVEDNISACGKLADIYKLLGDSANAQAYLYKSFDYDTPRAEFCCRIGFNHLNAGKYQQAIFWYKLASELEKPTNSWGPKSEACWTYLPHLQLCVCYDRLGMHELAYKHNEIARDYRPDNPQILHNKKYL

SEQ ID NO: 175 - protein, 355 aa, Clostridium kluyveri DSM 555
KDSITVSLCMIVKNEEDTIGRCLDSVKDVIDEFIIVDTGSSDNTKDVIKKYTDNIYDFEWIDDFSAARNFAFSKATKDYIFWLDADDVLLPEDVEKFKALKKNLDTSIDSVTMRYNVSFDEYSNVTTSYRRNRLVKKEKNFKWIGFVHEYLEVYGNIINSEISVTHKKINYSPNRNLEIFQNKLKEGVEFTPRDILYYGNELYEHRMFEDALKYYNDFLDSKRGWYEDNIHVCGKICDYYQSINNGEECRKYAFKSFEYDSPRAEACCRLGFSFLQENKINQAIFWYETAANLKKPINSLGFFSDACWTWLPHLQLCVCYDRIGKHQLAYEHNEIAGKFRPNDKKILYNRNYFQS

SEQ ID NO: 176 - protein, 351 aa, Clostridium beijerinckii NCIMB 8052
TISLCMIVKNEEDVIANCLESVKDIVDEMIIVDTGSDDKTKKIVKRYTDKIYDFKWIDDFSAARNFAFSKATKDYILWLDADDVVLPEDGEKFKDLKETLDPTVDSVTAKYNTAFDEYGNVTASYRRNRLVKRSNNFQWFGFVHEYLAVGGNIINSEIAITHRKLKQTPKRNLEIYQNKLKEGVVFTPRDILYYGNELYDHRMFDEALQYYNKFLDSKQGWFEDNIRVCEKICDYYQSIDKVEDGRRYAFRSFEYDTPRAEACCKIGFSFLHEKKYKQSAFWYEQATKLEKPKDSWGFFNDACWTWLPHLQLCVCYDRLGDHNLAYEHNEIAAKFRPNDSRILYNRNYFKS

SEQ ID NO: 177 - protein, 345 aa, Bacillus weihenstephanensis KBAB4
TISLCMIVKDEEQTISKCLESVKSVVDEIIIVDTGSTDGTKEIVKKYDAKVYDFQWIEDFSAARNFAFSKATKEYILWLDADDIIDTEDIKKLLQLKHTLDRSTDAVSMKYYLTFDIEGNPTHSLRRYRLVNRSKNFQWYGFVHEYLEVYGNLINSDVGVSHKKEKAYTNRNLKIYEKHLESGKEFSPRDVYYYANECKDHRLFDKAVKGYSRFLDEEKGWVEDNIQACLKRAECYLELGDLKKSIQSCLQSFTYDTPRGELCCHLGRVFLQQGEYSKAIYWYHAAIDGPRPKDSPFVREECHTWLPHIQLCICYDRIKEYEKAIYHNEQAALFIPNNPSIEYNR

SEQ ID NO: 178 - protein, 366 aa, Artificial
  Substituion in SEQ ID NO 171
MSAKTENTWSLCMIVKDEEAVLDRCLQSIADIVDEIVIVDTGSQDRTQEIARKYTDLVFDFEWVDDFSEARNESFRHASMDYVLWLDADDVVSDVDRIKLAEFKKNLSSDVDAVTMWYHLAFQGDQPTVSSRLVRLVKRSRGFVWRGRVHEYLEINGNILNSDIAIIHRPVEHDAARNLRIYEKKLALGEDFSPRDMLYYANELLDHAQYEKAVQWYKRFLATGQCWKEDAITACFKLAECFRAMNQPEQSKQAVLHSFLYDTPRAEACCRIGYGYLEEGKIDQAIFWYDLATKCRRPANFVGFVNHACETWLPHIQLCVCYSRLGNYRKAYDHNERAAEYLGEDPMIVHNRSVLRAWMDGELEKP

SEQ ID NO: 179 - protein, 366 aa, Artificial
  Substituion in SEQ ID NO 171
MSAKTENTWSLCMIVKDEEAVLDRCLQSIADIVDEIVIVDTGSQDRTQEIARKYTDLVFDFEWVDDFSEARNESFRHASMDYVLWLDADDVVSDVDRIKLAEFKKNLSSDVDAVTMWYHLAFQGDQPTVSSRIVRLVKRSRGFVWRGRVHEYLEINGNILNSDIAIIHRPVEHDAARNLRIYEKKLALGEDFSPRDMLYYANELLDHAQYEKAVQWYKRFLATGQCWKEDAITACFKLAECFRAMNQPEQSKQAVLHSFLYDTPRAEACCRIGYGYLEEGKIDQAIFWYDLATKCRRPANFVGFVNHACETWLPHIQLCVCYSRLGQYRKAYDHNERAAEYLGEDPMIVHNRSVLRAWMDGELEKP

SEQ ID NO: 180 - protein, 366 aa, Artificial
  Substituion in SEQ ID NO 171
MSAKTENTWSLCMIVKDEEAVLDRCLQSIADIVDEIVIVDTGSQDRTQEIARKYTDLVFDFEWVDDFSEARNESFRHASMDYVLWLDADDVVSDVDRIKLAEFKKNLSSDVDAVTMWYHLAFQGDNPTVSSRLVRLVKRSRGFVWRGRVHEYLEINGNILNSDIAIIHRPVEHDAARNLRIYEKKLALGEDFSPRDMLYYANELLDHAQYEKAVQWYKRFLATGQCWKEDAITACFKLAECFRAMNQPEQSKQAVLHSFLYDTPRAEACCRIGYGYLEEGKIDQAIFWYDLATKCRRPANFVGFVNHACETWLPHIQLCVCYSRLGQYRKAYDHNERAAEYLGEDPMIVHNRSVLRAWMDGELEKP

SEQ ID NO: 181 - protein, 366 aa, Artificial
  Substituion in SEQ ID NO 171
MSAKTENTWSLCMIVKDEEAVLDRCLQSIADIVDEIVIVDTGSQDRTQEIARKYTDLVFDFEWVDDFSEARNESFRHASMDYVLWLDADDVVSDVDRIKLAEFKKNLSSEVDAVTMWYHLAFQGDQPTVSSRLVRLVKRSRGFVWRGRVHEYLEINGNILNSDIAIIHRPVEHDAARNLRIYEKKLALGEDFSPRDMLYYANELLDHAQYEKAVQWYKRFLATGQCWKEDAITACFKLAECFRAMNQPEQSKQAVLHSFLYDTPRAEACCRIGYGYLEEGKIDQAIFWYDLATKCRRPANFVGFVNHACETWLPHIQLCVCYSRLGQYRKAYDHNERAAEYLGEDPMIVHNRSVLRAWMDGELEKP

SEQ ID NO: 182 - protein, 366 aa, Artificial
  Substituion in SEQ ID NO 171
MSAKTENTWSLCMIVKDEEAVLDRCLQSIADIVDEIVIVDTGSQDRTQEIARKYTDLVFDFEWVDDFSEARNESFRHASMDYVLWLDADDVVSDVDRIKLAEFKKNLSSDVDAVTMWYHLAFQGDQPTVSSRLVRLVKRSRGFVWRGRVHEYLEINGNILNSDIAIIHRPVEHDAARNLRIYEKKLALGEDFSPRDMLYYANELLDHAQYEKAVQWYKRFLATGQCWKEDAITACFKLAECFRAMNQPDQSKQAVLHSFLYDTPRAEACCRIGYGYLEEGKIDQAIFWYDLATKCRRPANFVGFVNHACETWLPHIQLCVCYSRLGQYRKAYDHNERAAEYLGEDPMIVHNRSVLRAWMDGELEKP

SEQ ID NO: 183 - DNA, 1101 bp, Artificial
  Substituion in SEQ ID NO 172
gtgtccgctaaaacggaaaatacttggagcttatgtatgatcgtgaaagatgaggaggctgtactggatcgctgtctccaatcgattgccgacattgtcgatgaaatcgtgatagttgatacaggttcgcaagacaggacccaagagatcgctcgcaaatacacagatctggtgttcgattttgagtgggtggatgatttcagcgaggcgcgcaacgaatcgttccggcacgccagtatggattacgtcctctggctagacgccgacgacgttgtgtcagatgtagatcgaatcaaactggcagaattcaagaaaaacctttcttccgacgtggacgcagtgacaatgtggtatcacctcgcatttcaaggtgatcagccgaccgtcagttctcgtctcgttcgcctcgtgaaacgatcgcgcggttttgtttggcggggccgcgtccatgaatatcttgaaattaacggcaacatcctcaacagcgacatcgcaatcatccatcgccctgtcgagcatgatgccgctcgcaatcttcgcatctacgagaagaagctcgcgcttggcgaagatttcagcccacgcgacatgctctactacgccaatgagctgctggatcatgcacaatacgagaaggctgtacaatggtacaagcggtttttagcaacaggacaatgttggaaagaggacgccatcacagcttgcttcaagctcgccgaatgctttcgtgcgatgaatcaaccggagcaaagtaagcaagctgtgttacactcgttcctgtacgatacgccgcgagccgaagcgtgttgtcgtatcgggtatggttacttggaagagggaaagatcgatcaggccatcttttggtatgatctagcaaccaaatgcaggcgtccagccaattttgtgggatttgtcaaccatgcatgtgaaacctggttaccccatattcaactttgtgtgtgttatagccggctcggcaattacaggaaagcttatgatcataacgaacgagccgcggagtacctaggtgaagatccgatgatcgtccacaatcgttctgtattgcgagcctggatggatggcgaactcgagaaaccgtaa

SEQ ID NO: 184 - DNA, 1101 bp, Artificial
  Substituion in SEQ ID NO 172
gtgtccgctaaaacggaaaatacttggagcttatgtatgatcgtgaaagatgaggaggctgtactggatcgctgtctccaatcgattgccgacattgtcgatgaaatcgtgatagttgatacaggttcgcaagacaggacccaagagatcgctcgcaaatacacagatctggtgttcgattttgagtgggtggatgatttcagcgaggcgcgcaacgaatcgttccggcacgccagtatggattacgtcctctggctagacgccgacgacgttgtgtcagatgtagatcgaatcaaactggcagaattcaagaaaaacctttcttccgacgtggacgcagtgacaatgtggtatcacctcgcatttcaaggtgatcagccgaccgtcagttctcgtattgttcgcctcgtgaaacgatcgcgcggttttgtttggcggggccgcgtccatgaatatcttgaaattaacggcaacatcctcaacagcgacatcgcaatcatccatcgccctgtcgagcatgatgccgctcgcaatcttcgcatctacgagaagaagctcgcgcttggcgaagatttcagcccacgcgacatgctctactacgccaatgagctgctggatcatgcacaatacgagaaggctgtacaatggtacaagcggtttttagcaacaggacaatgttggaaagaggacgccatcacagcttgcttcaagctcgccgaatgctttcgtgcgatgaatcaaccggagcaaagtaagcaagctgtgttacactcgttcctgtacgatacgccgcgagccgaagcgtgttgtcgtatcgggtatggttacttggaagagggaaagatcgatcaggccatcttttggtatgatctagcaaccaaatgcaggcgtccagccaattttgtgggatttgtcaaccatgcatgtgaaacctggttaccccatattcaactttgtgtgtgttatagccggctcggccaatacaggaaagcttatgatcataacgaacgagccgcggagtacctaggtgaagatccgatgatcgtccacaatcgttctgtattgcgagcctggatggatggcgaactcgagaaaccgtaa

SEQ ID NO: 185 - DNA, 1101 bp, Artificial
  Substituion in SEQ ID NO 172
gtgtccgctaaaacggaaaatacttggagcttatgtatgatcgtgaaagatgaggaggctgtactggatcgctgtctccaatcgattgccgacattgtcgatgaaatcgtgatagttgatacaggttcgcaagacaggacccaagagatcgctcgcaaatacacagatctggtgttcgattttgagtgggtggatgatttcagcgaggcgcgcaacgaatcgttccggcacgccagtatggattacgtcctctggctagacgccgacgacgttgtgtcagatgtagatcgaatcaaactggcagaattcaagaaaaacctttcttccgacgtggacgcagtgacaatgtggtatcacctcgcatttcaaggtgataatccgaccgtcagttctcgtctcgttcgcctcgtgaaacgatcgcgcggttttgtttggcggggccgcgtccatgaatatcttgaaattaacggcaacatcctcaacagcgacatcgcaatcatccatcgccctgtcgagcatgatgccgctcgcaatcttcgcatctacgagaagaagctcgcgcttggcgaagatttcagcccacgcgacatgctctactacgccaatgagctgctggatcatgcacaatacgagaaggctgtacaatggtacaagcggtttttagcaacaggacaatgttggaaagaggacgccatcacagcttgcttcaagctcgccgaatgctttcgtgcgatgaatcaaccggagcaaagtaagcaagctgtgttacactcgttcctgtacgatacgccgcgagccgaagcgtgttgtcgtatcgggtatggttacttggaagagggaaagatcgatcaggccatcttttggtatgatctagcaaccaaatgcaggcgtccagccaattttgtgggatttgtcaaccatgcatgtgaaacctggttaccccatattcaactttgtgtgtgttatagccggctcggccaatacaggaaagcttatgatcataacgaacgagccgcggagtacctaggtgaagatccgatgatcgtccacaatcgttctgtattgcgagcctggatggatggcgaactcgagaaaccgtaa

SEQ ID NO: 186 - DNA, 1101 bp, Artificial
  Substituion in SEQ ID NO 172
gtgtccgctaaaacggaaaatacttggagcttatgtatgatcgtgaaagatgaggaggctgtactggatcgctgtctccaatcgattgccgacattgtcgatgaaatcgtgatagttgatacaggttcgcaagacaggacccaagagatcgctcgcaaatacacagatctggtgttcgattttgagtgggtggatgatttcagcgaggcgcgcaacgaatcgttccggcacgccagtatggattacgtcctctggctagacgccgacgacgttgtgtcagatgtagatcgaatcaaactggcagaattcaagaaaaacctttcttccgaagtggacgcagtgacaatgtggtatcacctcgcatttcaaggtgatcagccgaccgtcagttctcgtctcgttcgcctcgtgaaacgatcgcgcggttttgtttggcggggccgcgtccatgaatatcttgaaattaacggcaacatcctcaacagcgacatcgcaatcatccatcgccctgtcgagcatgatgccgctcgcaatcttcgcatctacgagaagaagctcgcgcttggcgaagatttcagcccacgcgacatgctctactacgccaatgagctgctggatcatgcacaatacgagaaggctgtacaatggtacaagcggtttttagcaacaggacaatgttggaaagaggacgccatcacagcttgcttcaagctcgccgaatgctttcgtgcgatgaatcaaccggagcaaagtaagcaagctgtgttacactcgttcctgtacgatacgccgcgagccgaagcgtgttgtcgtatcgggtatggttacttggaagagggaaagatcgatcaggccatcttttggtatgatctagcaaccaaatgcaggcgtccagccaattttgtgggatttgtcaaccatgcatgtgaaacctggttaccccatattcaactttgtgtgtgttatagccggctcggccaatacaggaaagcttatgatcataacgaacgagccgcggagtacctaggtgaagatccgatgatcgtccacaatcgttctgtattgcgagcctggatggatggcgaactcgagaaaccgtaa

SEQ ID NO: 187 - DNA, 1101 bp, Artificial
  Substituion in SEQ ID NO 172
gtgtccgctaaaacggaaaatacttggagcttatgtatgatcgtgaaagatgaggaggctgtactggatcgctgtctccaatcgattgccgacattgtcgatgaaatcgtgatagttgatacaggttcgcaagacaggacccaagagatcgctcgcaaatacacagatctggtgttcgattttgagtgggtggatgatttcagcgaggcgcgcaacgaatcgttccggcacgccagtatggattacgtcctctggctagacgccgacgacgttgtgtcagatgtagatcgaatcaaactggcagaattcaagaaaaacctttcttccgacgtggacgcagtgacaatgtggtatcacctcgcatttcaaggtgatcagccgaccgtcagttctcgtctcgttcgcctcgtgaaacgatcgcgcggttttgtttggcggggccgcgtccatgaatatcttgaaattaacggcaacatcctcaacagcgacatcgcaatcatccatcgccctgtcgagcatgatgccgctcgcaatcttcgcatctacgagaagaagctcgcgcttggcgaagatttcagcccacgcgacatgctctactacgccaatgagctgctggatcatgcacaatacgagaaggctgtacaatggtacaagcggtttttagcaacaggacaatgttggaaagaggacgccatcacagcttgcttcaagctcgccgaatgctttcgtgcgatgaatcaaccggatcaaagtaagcaagctgtgttacactcgttcctgtacgatacgccgcgagccgaagcgtgttgtcgtatcgggtatggttacttggaagagggaaagatcgatcaggccatcttttggtatgatctagcaaccaaatgcaggcgtccagccaattttgtgggatttgtcaaccatgcatgtgaaacctggttaccccatattcaactttgtgtgtgttatagccggctcggccaatacaggaaagcttatgatcataacgaacgagccgcggagtacctaggtgaagatccgatgatcgtccacaatcgttctgtattgcgagcctggatggatggcgaactcgagaaaccgtaa

SEQ ID NO: 188 - protein, 397 aa, Alicyclobacillus acidocaldarius
MTLEIGYVSTYVPRKCGLATYTHHLRQSVRRAAGPSAADQVIAMLAPDEDVKNYNRSYWFLRRDERRDYARIARRVNDSRIGVVSLQHEFGIFGGEAGSYILDFIDALDKPLVTTFHTVFQKPMSPYREVQKEIAERSDRIVVMNRQAIDYLVDAFGISPSKIHYLPHGTPVRSVTPRAELRKQFGWQDRAVIVTFGLLGPSKGIEFMLDAMPDIVREVPNALYVIAGQTHPEIVKREGEAYRESLMRRIHELHLDDHVVMLNQYMSESDIVDLITAADLYVTPYPNMEQITSGTLAYAVGMGQVVLTTPYAYARDLLKDVPELLVPYGDTRAWADRAVEILTNRDVRAKYAERISAIGADMTWPRVGERHWQLFQDVALRARHRASGVKGFAVIAH

SEQ ID NO: 189 - DNA, 1194 bp, Alicyclobacillus acidocaldarius
atgacgttggaaatcggatatgtcagcacttatgtcccccggaaatgcggacttgccacatatacacaccatttgcgccagagcgttcgccgggcggcgggaccgtccgcggccgaccaggtcatcgccatgttggccccggatgaggacgtgaagaactacaaccgctcgtactggttccttcgccgggatgagcgcagggattacgcgcgcattgcacggcgggtgaacgacagccgaattggcgtggtctccctgcagcacgaattcggcatctttggcggcgaagcagggtcgtacatcctcgacttcattgacgcgctggacaaaccgctcgtgacgacgtttcacaccgtctttcaaaagcccatgtcgccttatcgcgaagtgcagaaggagatcgccgagagaagcgaccgcatcgtcgtgatgaatcgacaggccatcgattatctcgtcgacgcattcggcatctcgccgtcgaagatccactatctcccgcacggcacgccggtgcgatctgtgacgccgcgggccgagttgcggaagcagttcggttggcaagaccgggccgtgatcgtcacctttgggctgctcggtccgagcaagggcattgagttcatgttggatgcgatgccggacatcgtgcgcgaggttccgaacgcgctgtacgtgatcgccggacagacgcacccggaaattgtcaagcgcgagggcgaggcgtaccgcgagtcgctcatgcggcgaatccatgagctccacttggacgatcacgtcgtgatgctgaaccagtacatgtccgagtccgacatcgtggatcttatcacggcggcggatctctacgtcacgccttatccgaacatggagcagattacgagcgggacgctggcctacgcggtcggcatggggcaggtcgtgctgacgacgccgtacgcgtacgcgcgcgaccttctgaaggacgtgccggaactgctcgtgccctacggggacacgcgcgcgtgggcggatcgggctgtggaaatcctgacgaaccgcgatgtgcgcgcgaagtacgcggagcggatttcggcgattggggcagacatgacgtggccgcgcgtgggcgagcgccattggcagttgttccaggacgtcgccctgcgggctcgccatcgcgcatcgggggtgaagggatttgcggtcatcgcacactga

SEQ ID NO: 190 - protein, 394 aa, Geobacillus kaustophilus HTA426
IRIAYVSTYPPRRCGLATFTEHLRQSIDGVRGPSDGDRVIVLYNESDGDDAYRHNPAYWPLPAQNRAAYAEMAKRVNESDIDVVLLQHEFGIFGGEAGEYILDFIAALNKPLVTTFHTVFADPPLPYRPIQEKIAAASDAIIVMNRQAIPYLVKAFGLPEEKIVYIPHGAPGPSSENRDSLRRRLGFSGRKVMLTFGLLSRGKGIESVLAALPGVVRKVPEALYVIAGQTHPEVKKREGEAYREELKSLIHRLGLELHVYMEDRYFSEEELIDYLTACDLYVTPYPGMQQITSGTLAYAVGVGRPVVSTPYEHARDLLQGCEELLLPYGDTTAWEERLGQLLADEAALKRWEEKVRQIGANTHWPRVGEQHVALFARMCDAKRGEVKTIGTVSH

SEQ ID NO: 191 - protein, 393 aa, Geobacillus thermodenitrificans NG80-2
IAYVSTYPPRRCGLATFTEHLRQSIDSVRGKVEGDRVIVLYNEIDGDDAYRGNPAYWPLPAQNRAAYEKMARRVNESDIDVVVLQHEFGIFGGEAGEYILDFIAALQKPLITTFHTVFAAPEPPYRPIQEKIAAASDAIIVMNRQAIGYLVKAFGLPEEKIVYIPHGAPGPSSEERQSLRSRLGFHGRKVMFTFGLLSRGKGIESVLTALPGVVRKVPETLYVIAGQTHPEVKKREGEAYREELKALIHRLGLDDHVRMEDRYFSEEELIDYLTACDLYVTPYPGMQQITSGTLAYAVGVGRPVVSTPYEHARDLLQGCEELLLPYGNTSVWEERLVQLLADEAALERWERIVRQIGANTHWPRVGEQHIALFERVCTAANSGEVKAVDFVSH

SEQ ID NO: 192 - protein, 387 aa, Rhodopirellula baltica SH 1
LKIAFVGDYLPRKCGIATFTHDLRIGVARETCAECIVVTLDDIEGGYAYDNEVQFQVADQELDEYQSAADFLNFSNVDVISLQHEFGIFGGPCGSHILALLQDVRMPVVTTLHTVLSEPNEAQRAVMMQLIRLSTRLVVMTERSRQTLLDTYSVDSDQIDVIAHGIPEAPETDQSVLKEQFGVEDKPVALTFGLLSPGKGIEHVLKAIPEIVAKFPDFIYIILGATHPSLLREQGERYRISLERMAKELGVSKHVSFYNRFVELEELTEFIGAADLYITPYLNVEQAVSGTLAYAFGCGQAVISTPYWHAEELLADGRGVLVPFADPSAIAREVIGLLSDDDRRLAMRDKAYDLGRDMTWEHVSQLYIDSFNRARDQRTSSLKPLAV

SEQ ID NO: 193 - protein, 386 aa, Rhodospirillum rubrum ATCC 11170
IAFIGNSLPRRCGIATFTTHLRQAVGTRFADIETFIVAMTDPGQDYAYPASVPIEVHQDRLEDYLHAADLLNDGNVDIACLQHEFGIFGGEAGENILALLGRLTMPIVTTLHTVLDQPTPAQRDVLDRLFALSAKLIVMAQKARELLRTVYRVPADKIEVIAHGIPDFPFVGSEKAKAELGFSGRAVILTFGLLSPNKGIEVMIDAMPAIVKSRPDAVYVVLGATHPNLVREQGEAYRDSLRARVQDLGLQDHVVFLDRFVDQDTLLRFISMCDIYATPYLNLAQMTSGTLAYSFGLGKPVVSTPYWHARELLADGRGILVPFGDAGAIGLAIAGLLTDDARREAMAERAYIGSRSMIWQRSAERYLDVFTAVLQDRQVHEAAPVE

SEQ ID NO: 194 - protein, 375 aa, Pedobacter sp. BAL39
MKIAYISSYPPRECGIATFNHNLMRAIGHDKSAVSEDSFVVAMNDSDSITTYEYPKEVKYIIRQENQKDYIRAADYINTSLADACILEHEFGIFGGESGVYILPLLARLKKPLITIFHTILKDPSYMQLTIIREIAKYSSRIVVMSHRAVGFLTGIYGIPFAKIQLIEHGVPDLEAKTDNPVRQSLAFKGKKVLFTFGLISRNKGLETVIEALPEIVAQHPDVMYVILGTTHPGVVRNSGEEYRDSLKRLAQKLNVEENLTFINKFVSEGELFDYLTACDMYITPYLNEAQITSGTLSYAVGAGAAVVSTPYWHAQELLADNRGRLFDFKDSHALANNVNELLSDKQKLSELKGNAYEYGLHLRWPSTGQVFVDV

SEQ ID NO: 195 - protein, 397 aa, Artificial
  Substituion in SEQ ID NO 188
MTLEIGYVSTYVPRKCGLATYTHHLRQSVRRAAGPSAADQVIAMLAPDEDVKNYNRSYWFLRRDERRDYARIARRVNDSRIGVVSLQHEFGIFGGEAGSYILDFIDALDKPLVTTFHTVFQKPMSPYREVQKEIAERSDRIVVMNRQAIDYLVDAFGISPSKIHYLPHGTPVRSVTPRAELRKQFGWQDRAVIVTFGLLGPSKGIEFMLDAMPDIVREVPNALYVIAGQTHPEIVKREGEAYRESLMRRIHELHLDDHVVMLNQYMSESDIVDLITAADLYVTPYPNMEQITSGTLAYAVGMGQVVLTTPYAYARDLLKDVPELLVPYGDTRAWADRAVEILTNRDVRAKYAERISAIGADMTWPKVGERHWQLFQDVALRARHRASGVKGFAVIAH

SEQ ID NO: 196 - protein, 397 aa, Artificial
  Substituion in SEQ ID NO 188
MTLEIGYVSTYVPRKCGLATYTHHLRQSVRRAAGPSAADQVIAMLAPDEDVKNYNRSYWFLRRDERRDYARIARRVNDSRIGVVSLQHEFGIFGGEAGSYILDFIDALDKPLVTTFHTVFQKPMSPYREVQKEIAEKSDRIVVMNRQAIDYLVDAFGISPSKIHYLPHGTPVRSVTPRAELRKQFGWQDRAVIVTFGLLGPSKGIEFMLDAMPDIVREVPNALYVIAGQTHPEIVKREGEAYRESLMRRIHELHLDDHVVMLNQYMSESDIVDLITAADLYVTPYPNMEQITSGTLAYAVGMGQVVLTTPYAYARDLLKDVPELLVPYGDTRAWADRAVEILTNRDVRAKYAERISAIGADMTWPRVGERHWQLFQDVALRARHRASGVKGFAVIAH

SEQ ID NO: 197 - protein, 397 aa, Artificial
  Substituion in SEQ ID NO 188
MTLEIGYVSTYVPRKCGLATYTHHLRQSVRRAAGPSAADQVIAMLAPDEDVKNYNRSYWFLRRDERRDYARIARRVNDSRIGVVSLQHEFGIFGGEAGSYILDFIDALDKPLVTTFHTVFQKPMSPYREVQKEIAERSDRIVVMNRQAIDYLVDAFGISPSKIHYLPHGTPVRSVTPRAELRKQFGWQDRAVIVTFGLLGPSKGIEFMLDAMPDIVKEVPNALYVIAGQTHPEIVKREGEAYRESLMRRIHELHLDDHVVMLNQYMSESDIVDLITAADLYVTPYPNMEQITSGTLAYAVGMGQVVLTTPYAYARDLLKDVPELLVPYGDTRAWADRAVEILTNRDVRAKYAERISAIGADMTWPRVGERHWQLFQDVALRARHRASGVKGFAVIAH

SEQ ID NO: 198 - protein, 397 aa, Artificial
  Substituion in SEQ ID NO 188
MTLEIGYVSTYVPRKCGLATYTHHLRQSVRRAAGPSAADQVIAMLAPDEDVKNYNRSYWFLRRDERRDYARIARRVNDSRIGVVSLQHEFGIFGGEAGSYILDFIDALDKPLVTTFHTVFQKPMSPYREVQKEIAERSDRIVVMNRQAIDYLVDAFGISPSKIHYLPHGTPVRSVTPRAELRKQFGWQDRAVIVTFGLLGPSKGIEFMLDAMPDIVREVPNALYVIAGQTHPEIVKREGEAYRESLMRRIHELHLDDHVVMLNQYMSESDIVDLITAADLYVTPYPNMEQITSGTLAYAVGMGQVVLTTPYAYARDLLKDVPELLVPYGDTRAWADRAVEILTNRDVRAKYAERLSAIGADMTWPRVGERHWQLFQDVALRARHRASGVKGFAVIAH

SEQ ID NO: 199 - protein, 397 aa, Artificial
  Substituion in SEQ ID NO 188
MTLEIGYVSTYVPRKCGLATYTHHLRQSVRRAAGPSAADQVIAMLAPDEDVKNYNRSYWFLKRDERRDYARIARRVNDSRIGVVSLQHEFGIFGGEAGSYILDFIDALDKPLVTTFHTVFQKPMSPYREVQKEIAERSDRIVVMNRQAIDYLVDAFGISPSKIHYLPHGTPVRSVTPRAELRKQFGWQDRAVIVTFGLLGPSKGIEFMLDAMPDIVREVPNALYVIAGQTHPEIVKREGEAYRESLMRRIHELHLDDHVVMLNQYMSESDIVDLITAADLYVTPYPNMEQITSGTLAYAVGMGQVVLTTPYAYARDLLKDVPELLVPYGDTRAWADRAVEILTNRDVRAKYAERISAIGADMTWPRVGERHWQLFQDVALRARHRASGVKGFAVIAH

SEQ ID NO: 200 - DNA, 1194 bp, Artificial
  Substituion in SEQ ID NO 189
atgacgttggaaatcggatatgtcagcacttatgtcccccggaaatgcggacttgccacatatacacaccatttgcgccagagcgttcgccgggcggcgggaccgtccgcggccgaccaggtcatcgccatgttggccccggatgaggacgtgaagaactacaaccgctcgtactggttccttcgccgggatgagcgcagggattacgcgcgcattgcacggcgggtgaacgacagccgaattggcgtggtctccctgcagcacgaattcggcatctttggcggcgaagcagggtcgtacatcctcgacttcattgacgcgctggacaaaccgctcgtgacgacgtttcacaccgtctttcaaaagcccatgtcgccttatcgcgaagtgcagaaggagatcgccgagagaagcgaccgcatcgtcgtgatgaatcgacaggccatcgattatctcgtcgacgcattcggcatctcgccgtcgaagatccactatctcccgcacggcacgccggtgcgatctgtgacgccgcgggccgagttgcggaagcagttcggttggcaagaccgggccgtgatcgtcacctttgggctgctcggtccgagcaagggcattgagttcatgttggatgcgatgccggacatcgtgcgcgaggttccgaacgcgctgtacgtgatcgccggacagacgcacccggaaattgtcaagcgcgagggcgaggcgtaccgcgagtcgctcatgcggcgaatccatgagctccacttggacgatcacgtcgtgatgctgaaccagtacatgtccgagtccgacatcgtggatcttatcacggcggcggatctctacgtcacgccttatccgaacatggagcagattacgagcgggacgctggcctacgcggtcggcatggggcaggtcgtgctgacgacgccgtacgcgtacgcgcgcgaccttctgaaggacgtgccggaactgctcgtgccctacggggacacgcgcgcgtgggcggatcgggctgtggaaatcctgacgaaccgcgatgtgcgcgcgaagtacgcggagcggatttcggcgattggggcagacatgacgtggccgaaagtgggcgagcgccattggcagttgttccaggacgtcgccctgcgggctcgccatcgcgcatcgggggtgaagggatttgcggtcatcgcacactga

SEQ ID NO: 201 - DNA, 1194 bp, Artificial
  Substituion in SEQ ID NO 189
atgacgttggaaatcggatatgtcagcacttatgtcccccggaaatgcggacttgccacatatacacaccatttgcgccagagcgttcgccgggcggcgggaccgtccgcggccgaccaggtcatcgccatgttggccccggatgaggacgtgaagaactacaaccgctcgtactggttccttcgccgggatgagcgcagggattacgcgcgcattgcacggcgggtgaacgacagccgaattggcgtggtctccctgcagcacgaattcggcatctttggcggcgaagcagggtcgtacatcctcgacttcattgacgcgctggacaaaccgctcgtgacgacgtttcacaccgtctttcaaaagcccatgtcgccttatcgcgaagtgcagaaggagatcgccgagaaaagcgaccgcatcgtcgtgatgaatcgacaggccatcgattatctcgtcgacgcattcggcatctcgccgtcgaagatccactatctcccgcacggcacgccggtgcgatctgtgacgccgcgggccgagttgcggaagcagttcggttggcaagaccgggccgtgatcgtcacctttgggctgctcggtccgagcaagggcattgagttcatgttggatgcgatgccggacatcgtgcgcgaggttccgaacgcgctgtacgtgatcgccggacagacgcacccggaaattgtcaagcgcgagggcgaggcgtaccgcgagtcgctcatgcggcgaatccatgagctccacttggacgatcacgtcgtgatgctgaaccagtacatgtccgagtccgacatcgtggatcttatcacggcggcggatctctacgtcacgccttatccgaacatggagcagattacgagcgggacgctggcctacgcggtcggcatggggcaggtcgtgctgacgacgccgtacgcgtacgcgcgcgaccttctgaaggacgtgccggaactgctcgtgccctacggggacacgcgcgcgtgggcggatcgggctgtggaaatcctgacgaaccgcgatgtgcgcgcgaagtacgcggagcggatttcggcgattggggcagacatgacgtggccgcgcgtgggcgagcgccattggcagttgttccaggacgtcgccctgcgggctcgccatcgcgcatcgggggtgaagggatttgcggtcatcgcacactga

SEQ ID NO: 202 - DNA, 1194 bp, Artificial
  Substituion in SEQ ID NO 189
atgacgttggaaatcggatatgtcagcacttatgtcccccggaaatgcggacttgccacatatacacaccatttgcgccagagcgttcgccgggcggcgggaccgtccgcggccgaccaggtcatcgccatgttggccccggatgaggacgtgaagaactacaaccgctcgtactggttccttcgccgggatgagcgcagggattacgcgcgcattgcacggcgggtgaacgacagccgaattggcgtggtctccctgcagcacgaattcggcatctttggcggcgaagcagggtcgtacatcctcgacttcattgacgcgctggacaaaccgctcgtgacgacgtttcacaccgtctttcaaaagcccatgtcgccttatcgcgaagtgcagaaggagatcgccgagagaagcgaccgcatcgtcgtgatgaatcgacaggccatcgattatctcgtcgacgcattcggcatctcgccgtcgaagatccactatctcccgcacggcacgccggtgcgatctgtgacgccgcgggccgagttgcggaagcagttcggttggcaagaccgggccgtgatcgtcacctttgggctgctcggtccgagcaagggcattgagttcatgttggatgcgatgccggacatcgtgaaagaggttccgaacgcgctgtacgtgatcgccggacagacgcacccggaaattgtcaagcgcgagggcgaggcgtaccgcgagtcgctcatgcggcgaatccatgagctccacttggacgatcacgtcgtgatgctgaaccagtacatgtccgagtccgacatcgtggatcttatcacggcggcggatctctacgtcacgccttatccgaacatggagcagattacgagcgggacgctggcctacgcggtcggcatggggcaggtcgtgctgacgacgccgtacgcgtacgcgcgcgaccttctgaaggacgtgccggaactgctcgtgccctacggggacacgcgcgcgtgggcggatcgggctgtggaaatcctgacgaaccgcgatgtgcgcgcgaagtacgcggagcggatttcggcgattggggcagacatgacgtggccgcgcgtgggcgagcgccattggcagttgttccaggacgtcgccctgcgggctcgccatcgcgcatcgggggtgaagggatttgcggtcatcgcacactga

SEQ ID NO: 203 - DNA, 1194 bp, Artificial
  Substituion in SEQ ID NO 189
atgacgttggaaatcggatatgtcagcacttatgtcccccggaaatgcggacttgccacatatacacaccatttgcgccagagcgttcgccgggcggcgggaccgtccgcggccgaccaggtcatcgccatgttggccccggatgaggacgtgaagaactacaaccgctcgtactggttccttcgccgggatgagcgcagggattacgcgcgcattgcacggcgggtgaacgacagccgaattggcgtggtctccctgcagcacgaattcggcatctttggcggcgaagcagggtcgtacatcctcgacttcattgacgcgctggacaaaccgctcgtgacgacgtttcacaccgtctttcaaaagcccatgtcgccttatcgcgaagtgcagaaggagatcgccgagagaagcgaccgcatcgtcgtgatgaatcgacaggccatcgattatctcgtcgacgcattcggcatctcgccgtcgaagatccactatctcccgcacggcacgccggtgcgatctgtgacgccgcgggccgagttgcggaagcagttcggttggcaagaccgggccgtgatcgtcacctttgggctgctcggtccgagcaagggcattgagttcatgttggatgcgatgccggacatcgtgcgcgaggttccgaacgcgctgtacgtgatcgccggacagacgcacccggaaattgtcaagcgcgagggcgaggcgtaccgcgagtcgctcatgcggcgaatccatgagctccacttggacgatcacgtcgtgatgctgaaccagtacatgtccgagtccgacatcgtggatcttatcacggcggcggatctctacgtcacgccttatccgaacatggagcagattacgagcgggacgctggcctacgcggtcggcatggggcaggtcgtgctgacgacgccgtacgcgtacgcgcgcgaccttctgaaggacgtgccggaactgctcgtgccctacggggacacgcgcgcgtgggcggatcgggctgtggaaatcctgacgaaccgcgatgtgcgcgcgaagtacgcggagcggttatcggcgattggggcagacatgacgtggccgcgcgtgggcgagcgccattggcagttgttccaggacgtcgccctgcgggctcgccatcgcgcatcgggggtgaagggatttgcggtcatcgcacactga

SEQ ID NO: 204 - DNA, 1194 bp, Artificial
  Substituion in SEQ ID NO 189
atgacgttggaaatcggatatgtcagcacttatgtcccccggaaatgcggacttgccacatatacacaccatttgcgccagagcgttcgccgggcggcgggaccgtccgcggccgaccaggtcatcgccatgttggccccggatgaggacgtgaagaactacaaccgctcgtactggttccttaaacgggatgagcgcagggattacgcgcgcattgcacggcgggtgaacgacagccgaattggcgtggtctccctgcagcacgaattcggcatctttggcggcgaagcagggtcgtacatcctcgacttcattgacgcgctggacaaaccgctcgtgacgacgtttcacaccgtctttcaaaagcccatgtcgccttatcgcgaagtgcagaaggagatcgccgagagaagcgaccgcatcgtcgtgatgaatcgacaggccatcgattatctcgtcgacgcattcggcatctcgccgtcgaagatccactatctcccgcacggcacgccggtgcgatctgtgacgccgcgggccgagttgcggaagcagttcggttggcaagaccgggccgtgatcgtcacctttgggctgctcggtccgagcaagggcattgagttcatgttggatgcgatgccggacatcgtgcgcgaggttccgaacgcgctgtacgtgatcgccggacagacgcacccggaaattgtcaagcgcgagggcgaggcgtaccgcgagtcgctcatgcggcgaatccatgagctccacttggacgatcacgtcgtgatgctgaaccagtacatgtccgagtccgacatcgtggatcttatcacggcggcggatctctacgtcacgccttatccgaacatggagcagattacgagcgggacgctggcctacgcggtcggcatggggcaggtcgtgctgacgacgccgtacgcgtacgcgcgcgaccttctgaaggacgtgccggaactgctcgtgccctacggggacacgcgcgcgtgggcggatcgggctgtggaaatcctgacgaaccgcgatgtgcgcgcgaagtacgcggagcggatttcggcgattggggcagacatgacgtggccgcgcgtgggcgagcgccattggcagttgttccaggacgtcgccctgcgggctcgccatcgcgcatcgggggtgaagggatttgcggtcatcgcacactga

SEQ ID NO: 205 - protein, 404 aa, Alicyclobacillus acidocaldarius
MRSSHTDGLPVSLDHLRRMTDDTGLIEHAIGRIPRRQEGYSTDDNARALWLAYEWLHYARERGLEAEAADLARLIDIYFAFLAWVQKPDGWFHNNVSYDRRFELEVPSDDCQGRSVYALAVGMCEERDPARLTAYAQVLRRGLEAALRLTHARGVAHVVAAAARLLRHAEGVELPEDAAPEFWAFVRQRLPGVVERGARDLVSRFEAHARGDWPWFEDRMTYDNAVMPWALFEAYALTGEARWREVAEASLDGLLARMRAPEGWLRPIGNRGFAAPGFTAIWDQQPLEIAQLAIACESAWRATGDTAYRRLTAECQRWFYGENDKGVPMADPADGSCCDGLTPQGPNLNRGAESTWSYLITEIHVERAFADDLDAARAFGAWVGVPRQTLVSARSRRALGGFHR

SEQ ID NO: 206 - DNA, 1215 bp, Alicyclobacillus acidocaldarius
ttgcggtcatcgcacactgatgggctgccggtttcgctggatcacctgcgccggatgacagacgacacagggctcattgaacacgcgattggccgcattcctcgccgtcaggaagggtattccaccgacgacaacgcgcgggcgctctggctcgcgtacgagtggctccactacgcccgcgagcggggcctggaggcggaggcggccgatctcgcgcggctcatcgacatctacttcgcgtttttggcctgggtccagaagcccgacggctggttccacaacaacgtgtcgtacgatcgccgctttgagctggaggttccgtcggacgactgccaagggaggtccgtgtacgcgctggcggtgggcatgtgcgaggagcgcgatccggcccgcctgacggcctacgcgcaagtgcttcgccggggccttgaggcagcccttaggctcacgcacgcacgcggcgtcgcccatgtcgtagcggccgccgcaaggcttttgcgccacgcagagggggtcgagcttcccgaagacgcggcgcccgagttctgggcctttgtccgtcagcgcctgccgggcgtcgtggagcgcggcgctcgcgatctcgtgtcgcggttcgaggcgcacgcacgcggcgactggccttggttcgaggaccgcatgacgtacgacaacgcggtcatgccctgggcgctcttcgaagcctatgcgctcaccggcgaggcccgatggagagaagtcgcggaagcctcgctcgacgggcttctcgcccgcatgcgtgcgcccgagggatggcttcggcccattggcaaccgcggcttcgcggcgcctggcttcaccgccatttgggaccagcagccgctggaaatcgcccagctcgccattgcgtgcgaatcggcctggcgcgcgacgggtgacacggcctatcggcggcttacggccgagtgccagcgctggttctacggtgaaaacgacaaaggggtgccgatggccgatccggccgacggcagttgctgcgacggcctgacgccgcagggtcccaacctgaaccgcggtgcagagtcgacgtggtcgtacctcatcaccgagatccacgtcgagcgggcatttgccgatgatctggacgccgcgcgggcgttcggcgcgtgggtgggcgttccgcgccagaccctcgtgtccgcacggtcgagacgggcgctcggcggctttcaccggtga

SEQ ID NO: 207 - protein, 337 aa, Geobacillus kaustophilus HTA426
IKFDHLERMTDDTGLLEHSLGRIPRRREGYSTDDNARAIWACLEWMALCEDKGEKERLHRLLDRYLAFLLWAQNDDGTFHNNFFFDRTKEEETPSDDCFGRSFWATALAYVRLSDPARREAAADMLRRAMPAAWELRSLRGVAWGVATCGVLLTEGRPLGVDQEEVAALAARLEQRLLAAYWEHAGDDWYWYEPELTYANGVLPWALWTAYRRAPRDEVKEVAEKSLAFLIEKMSGPGGVIRPVGNRGWCSRRYRADWDQQPLDVMKLALAAREAYWATDDERYRGVVRRCLAWFYGQNDGNAPLADPSDGSCCDGLGPNGPNPNRGAESTLSYLLT

SEQ ID NO: 208 - protein, 329 aa, Geobacillus thermodenitrificans NG80-2
MTDDTGLLEHSLGRIPRRREGYSTDDNARAIWACLEWLALLKNREMEKRLYRLLDRYLAFLLWAQNDDGTFHNNFFFDRTKEEETPSDDCLGRSFWAVASAYIQLNDPARCEAAADMLRRGMPAAWKLHSLRGIAWGLAACGLLLEKASPPGVDKEELATLAGRFERRLLEAYWTHTDDGWRWYEPELTYGNGVLPWALWTAYRRAPRQEVREVAEESLAFLIEMMSGPEGTIRPVGNRGWCSRRYRADWDQQPIDVMKLALAAREAYWATEDERYRDVVRRCLAWFYGKNDGNVPLADRSDGSCCDGLGPNGPNPNRGAESTLSYLLT

SEQ ID NO: 209 - protein, 339 aa, Symbiobacterium thermophilum IAM 14863
LSHLQRLTDPTGVIQHAVGPIPNLTTGYTSDDNARALLVSVWAARAGEATAQLSETYLAFLAYAQRPDGWFHNAFSYDRNPLAEDRSEDCQARCLWGLAAAATQLGGSSVAWTAAHLFRRGLAPCGSVRTLRGRAGVAVAMAEWLEHRRADGRPDGAPTDDEVRAHLIRAADGLTDAWKQHATRDWAWFEDRLTYDNALLPYALLRAGRILDVPEYRRIGLTALEFLAGATFRDGVFWPIGNDGWYVRGGRRAEFDQQPLEATAMVLACQEAGAVTGDKVWHGMALDAARWFTGRNALGVPLLDPETGGCHDGLNPHGVNRNQGAESTLAWLMAAYGLE

SEQ ID NO: 210 - protein, 322 aa, Clostridium thermocellum ATCC 27405
DHIFRMTDDTGMLQHSKYSLPDPNHGYTTDDNARALIMALMLYKKYGEKKYLDLVYRYSSFLLNAQNEKGKFKNFMGYDRKWLEDEGSEDCFGRCLWAIGFALSGDFTPRGVKHALLEIFNKAMPHAANLSYLRGKAYSAIGLSFFDGDDSKELVFSIAQSLCCQYDEHKDGEWKWFEDVVSYCNSVLPWSLLTAYKVTGEKRFLETAEESLDFLGKITFKDGYFKPVGCNGWFKKGKEQAEFDEQPVEACEAVLTYLEAFELTGKTKYLEKAKICNAWYSGMNSKGIPLVDPETGGCYDGLTQKGVNLNMGAESLVSYIIS

SEQ ID NO: 211 - protein, 333 aa, Thermoanaerobacter tengcongensis MB4
HLFTLTDDTGIFQHSLYSIPDPSKGYTTDDNARAAIAATMLYQVYREEVYLSLLRRYLSFLIYAQNEEGFFRNFMNYNREFTEKKGSEDCFGRSLWALGYLLNVPFSDESYHNVAIRLLEKALFNVKKLYSLRGKAYSLIGLSLIYNSEAFEFDRGEIRDLVKSLSQDLLKSYYKNREENWKWFEDQMTYSNAILPWSLLKAYTVTKDEEVLRVAKESMDFLGSVTFKDGYFKPIGCKGWYKKGGKRAEFDEQPIEACESALMYIEAYRVFGEEEYLNKAKKCYRWFLGENSQNISLVDEETGGCYDGITEDGVNLNEGAESLISLIMTDMVV

SEQ ID NO: 212 - protein, 404 aa, Artificial
  Substituion in SEQ ID NO 205
MRSSHTDGLPVSLDHLRRMTDDTGLIEHAIGRIPRRQEGYSTDDNARALWLAYEWLHYARERGLEAEAADLARLIDIYFAFLAWVQKPDGWFHNNVSYDRRFELEVPSDDCQGRSVYALAVGMCEERDPARLTAYAQVLRRGLEAALRLTHARGVAHVVAAAARLLRHAEGVELPEDAAPEFWAFVRQRLPGVVERGARDLVSRFEAHARGDWPWFEDRMTYDNAVMPWALFEAYALTGEARWREVAEASLDGLLARMRAPEGWLRPIGNRGFAAPGFTAIWDQQPLEIAQLAIACESAWRATGDTAYRRLTAECQRWFYGENDKGVPMADPADGSCCDGLTPQGPNLNRGAESTWSYLITEIHVERAFAEDLDAARAFGAWVGVPRQTLVSARSRRALGGFHR

SEQ ID NO: 213 - protein, 404 aa, Artificial
  Substituion in SEQ ID NO 205
MRSSHTDGLPVSLDHLRRMTDDTGLIEHAIGRIPRRQEGYSTDDNARALWLAYEWLHYARERGLEAEAADLARLIDIYFAFLAWVQKPDGWFHNNVSYDRRFELEVPSDDCQGRSVYALAVGMCEERDPARLTAYAQVLRRGLEAALRLTHARGVAHVVAAAARLLRHAEGVELPEDAAPEFWAFVRQRLPGVVERGARDLVSRFEAHARGDWPWFEDRMTYDNAVMPWALFEAYALTGEARWREVAEASLDGLLARMRAPEGWLRPIGNRGFAAPGFTAIWDQQPLEIAQLAIACESAWRATGDTAYRRLTAECQRWFYGENDKGVPMADPADGSCCDGLTPQGPNLNRGAESTWSYLITEIHVERAFADDIDAARAFGAWVGVPRQTLVSARSRRALGGFHR

SEQ ID NO: 214 - protein, 404 aa, Artificial
  Substituion in SEQ ID NO 205
MRSSHTDGLPVSLDHLRRMTDDTGLIEHAIGRIPRRQEGYSTDDNARALWLAYEWLHYARERGLEAEAADLARLIDIYFAFLAWVQKPDGWFHNNVSYDRRFELEVPSDDCQGRSVYALAVGMCEERDPARLTAYAQVLRRGLEAALRLTHARGVAHVVAAAARLLRHAEGVELPEDAAPEFWAFVRQRLPGVVERGARDLVSRFEAHARGDWPWFEDRMTYDNAVMPWALFEAYALTGEARWREVAEASLDGLLARMKAPEGWLRPIGNRGFAAPGFTAIWDQQPLEIAQLAIACESAWRATGDTAYRRLTAECQRWFYGENDKGVPMADPADGSCCDGLTPQGPNLNRGAESTWSYLITEIHVERAFADDLDAARAFGAWVGVPRQTLVSARSRRALGGFHR

SEQ ID NO: 215 - protein, 404 aa, Artificial
  Substituion in SEQ ID NO 205
MRSSHTDGLPVSLDHLRRMTDDTGLIEHAIGRIPRRQEGYSTDDNARALWLAYEWLHYARERGLEAEAADLARLIDIYFAFLAWVQKPDGWFHNNVSYDRRFELEVPSDDCQGRSVYALAVGMCEERDPARLTAYAQVLRRGLEAALRLTHARGVAHVVAAAARLLRHAEGVELPEDAAPEFWAFVRQRLPGVVERGARDLVSRFEAHARGDWPWFEDRMTYENAVMPWALFEAYALTGEARWREVAEASLDGLLARMRAPEGWLRPIGNRGFAAPGFTAIWDQQPLEIAQLAIACESAWRATGDTAYRRLTAECQRWFYGENDKGVPMADPADGSCCDGLTPQGPNLNRGAESTWSYLITEIHVERAFADDLDAARAFGAWVGVPRQTLVSARSRRALGGFHR

SEQ ID NO: 216 - protein, 404 aa, Artificial
  Substituion in SEQ ID NO 205
MRSSHTDGLPVSLDHLRRMTDDTGLIEHAIGRIPRRQEGYSTDDNARALWLAYEWLHYARERGLEAEAADLARLIDIYFAFLAWVQKPDGWFHNNVSYDRRFELEVPSDDCQGRSVYALAVGMCEERDPARLTAYAQVLRRGLDAALRLTHARGVAHVVAAAARLLRHAEGVELPEDAAPEFWAFVRQRLPGVVERGARDLVSRFEAHARGDWPWFEDRMTYDNAVMPWALFEAYALTGEARWREVAEASLDGLLARMRAPEGWLRPIGNRGFAAPGFTAIWDQQPLEIAQLAIACESAWRATGDTAYRRLTAECQRWFYGENDKGVPMADPADGSCCDGLTPQGPNLNRGAESTWSYLITEIHVERAFADDLDAARAFGAWVGVPRQTLVSARSRRALGGFHR

SEQ ID NO: 217 - DNA, 1215 bp, Artificial
  Substituion in SEQ ID NO 206
ttgcggtcatcgcacactgatgggctgccggtttcgctggatcacctgcgccggatgacagacgacacagggctcattgaacacgcgattggccgcattcctcgccgtcaggaagggtattccaccgacgacaacgcgcgggcgctctggctcgcgtacgagtggctccactacgcccgcgagcggggcctggaggcggaggcggccgatctcgcgcggctcatcgacatctacttcgcgtttttggcctgggtccagaagcccgacggctggttccacaacaacgtgtcgtacgatcgccgctttgagctggaggttccgtcggacgactgccaagggaggtccgtgtacgcgctggcggtgggcatgtgcgaggagcgcgatccggcccgcctgacggcctacgcgcaagtgcttcgccggggccttgaggcagcccttaggctcacgcacgcacgcggcgtcgcccatgtcgtagcggccgccgcaaggcttttgcgccacgcagagggggtcgagcttcccgaagacgcggcgcccgagttctgggcctttgtccgtcagcgcctgccgggcgtcgtggagcgcggcgctcgcgatctcgtgtcgcggttcgaggcgcacgcacgcggcgactggccttggttcgaggaccgcatgacgtacgacaacgcggtcatgccctgggcgctcttcgaagcctatgcgctcaccggcgaggcccgatggagagaagtcgcggaagcctcgctcgacgggcttctcgcccgcatgcgtgcgcccgagggatggcttcggcccattggcaaccgcggcttcgcggcgcctggcttcaccgccatttgggaccagcagccgctggaaatcgcccagctcgccattgcgtgcgaatcggcctggcgcgcgacgggtgacacggcctatcggcggcttacggccgagtgccagcgctggttctacggtgaaaacgacaaaggggtgccgatggccgatccggccgacggcagttgctgcgacggcctgacgccgcagggtcccaacctgaaccgcggtgcagagtcgacgtggtcgtacctcatcaccgagatccacgtcgagcgggcatttgccgaagatctggacgccgcgcgggcgttcggcgcgtgggtgggcgttccgcgccagaccctcgtgtccgcacggtcgagacgggcgctcggcggctttcaccggtga

SEQ ID NO: 218 - DNA, 1215 bp, Artificial
  Substituion in SEQ ID NO 206
ttgcggtcatcgcacactgatgggctgccggtttcgctggatcacctgcgccggatgacagacgacacagggctcattgaacacgcgattggccgcattcctcgccgtcaggaagggtattccaccgacgacaacgcgcgggcgctctggctcgcgtacgagtggctccactacgcccgcgagcggggcctggaggcggaggcggccgatctcgcgcggctcatcgacatctacttcgcgtttttggcctgggtccagaagcccgacggctggttccacaacaacgtgtcgtacgatcgccgctttgagctggaggttccgtcggacgactgccaagggaggtccgtgtacgcgctggcggtgggcatgtgcgaggagcgcgatccggcccgcctgacggcctacgcgcaagtgcttcgccggggccttgaggcagcccttaggctcacgcacgcacgcggcgtcgcccatgtcgtagcggccgccgcaaggcttttgcgccacgcagagggggtcgagcttcccgaagacgcggcgcccgagttctgggcctttgtccgtcagcgcctgccgggcgtcgtggagcgcggcgctcgcgatctcgtgtcgcggttcgaggcgcacgcacgcggcgactggccttggttcgaggaccgcatgacgtacgacaacgcggtcatgccctgggcgctcttcgaagcctatgcgctcaccggcgaggcccgatggagagaagtcgcggaagcctcgctcgacgggcttctcgcccgcatgcgtgcgcccgagggatggcttcggcccattggcaaccgcggcttcgcggcgcctggcttcaccgccatttgggaccagcagccgctggaaatcgcccagctcgccattgcgtgcgaatcggcctggcgcgcgacgggtgacacggcctatcggcggcttacggccgagtgccagcgctggttctacggtgaaaacgacaaaggggtgccgatggccgatccggccgacggcagttgctgcgacggcctgacgccgcagggtcccaacctgaaccgcggtgcagagtcgacgtggtcgtacctcatcaccgagatccacgtcgagcgggcatttgccgatgatattgacgccgcgcgggcgttcggcgcgtgggtgggcgttccgcgccagaccctcgtgtccgcacggtcgagacgggcgctcggcggctttcaccggtga

SEQ ID NO: 219 - DNA, 1215 bp, Artificial
  Substituion in SEQ ID NO 206
ttgcggtcatcgcacactgatgggctgccggtttcgctggatcacctgcgccggatgacagacgacacagggctcattgaacacgcgattggccgcattcctcgccgtcaggaagggtattccaccgacgacaacgcgcgggcgctctggctcgcgtacgagtggctccactacgcccgcgagcggggcctggaggcggaggcggccgatctcgcgcggctcatcgacatctacttcgcgtttttggcctgggtccagaagcccgacggctggttccacaacaacgtgtcgtacgatcgccgctttgagctggaggttccgtcggacgactgccaagggaggtccgtgtacgcgctggcggtgggcatgtgcgaggagcgcgatccggcccgcctgacggcctacgcgcaagtgcttcgccggggccttgaggcagcccttaggctcacgcacgcacgcggcgtcgcccatgtcgtagcggccgccgcaaggcttttgcgccacgcagagggggtcgagcttcccgaagacgcggcgcccgagttctgggcctttgtccgtcagcgcctgccgggcgtcgtggagcgcggcgctcgcgatctcgtgtcgcggttcgaggcgcacgcacgcggcgactggccttggttcgaggaccgcatgacgtacgacaacgcggtcatgccctgggcgctcttcgaagcctatgcgctcaccggcgaggcccgatggagagaagtcgcggaagcctcgctcgacgggcttctcgcccgcatgaaagcgcccgagggatggcttcggcccattggcaaccgcggcttcgcggcgcctggcttcaccgccatttgggaccagcagccgctggaaatcgcccagctcgccattgcgtgcgaatcggcctggcgcgcgacgggtgacacggcctatcggcggcttacggccgagtgccagcgctggttctacggtgaaaacgacaaaggggtgccgatggccgatccggccgacggcagttgctgcgacggcctgacgccgcagggtcccaacctgaaccgcggtgcagagtcgacgtggtcgtacctcatcaccgagatccacgtcgagcgggcatttgccgatgatctggacgccgcgcgggcgttcggcgcgtgggtgggcgttccgcgccagaccctcgtgtccgcacggtcgagacgggcgctcggcggctttcaccggtga

SEQ ID NO: 220 - DNA, 1215 bp, Artificial
  Substituion in SEQ ID NO 206
ttgcggtcatcgcacactgatgggctgccggtttcgctggatcacctgcgccggatgacagacgacacagggctcattgaacacgcgattggccgcattcctcgccgtcaggaagggtattccaccgacgacaacgcgcgggcgctctggctcgcgtacgagtggctccactacgcccgcgagcggggcctggaggcggaggcggccgatctcgcgcggctcatcgacatctacttcgcgtttttggcctgggtccagaagcccgacggctggttccacaacaacgtgtcgtacgatcgccgctttgagctggaggttccgtcggacgactgccaagggaggtccgtgtacgcgctggcggtgggcatgtgcgaggagcgcgatccggcccgcctgacggcctacgcgcaagtgcttcgccggggccttgaggcagcccttaggctcacgcacgcacgcggcgtcgcccatgtcgtagcggccgccgcaaggcttttgcgccacgcagagggggtcgagcttcccgaagacgcggcgcccgagttctgggcctttgtccgtcagcgcctgccgggcgtcgtggagcgcggcgctcgcgatctcgtgtcgcggttcgaggcgcacgcacgcggcgactggccttggttcgaggaccgcatgacgtacgaaaacgcggtcatgccctgggcgctcttcgaagcctatgcgctcaccggcgaggcccgatggagagaagtcgcggaagcctcgctcgacgggcttctcgcccgcatgcgtgcgcccgagggatggcttcggcccattggcaaccgcggcttcgcggcgcctggcttcaccgccatttgggaccagcagccgctggaaatcgcccagctcgccattgcgtgcgaatcggcctggcgcgcgacgggtgacacggcctatcggcggcttacggccgagtgccagcgctggttctacggtgaaaacgacaaaggggtgccgatggccgatccggccgacggcagttgctgcgacggcctgacgccgcagggtcccaacctgaaccgcggtgcagagtcgacgtggtcgtacctcatcaccgagatccacgtcgagcgggcatttgccgatgatctggacgccgcgcgggcgttcggcgcgtgggtgggcgttccgcgccagaccctcgtgtccgcacggtcgagacgggcgctcggcggctttcaccggtga

SEQ ID NO: 221 - DNA, 1215 bp, Artificial
  Substituion in SEQ ID NO 206
ttgcggtcatcgcacactgatgggctgccggtttcgctggatcacctgcgccggatgacagacgacacagggctcattgaacacgcgattggccgcattcctcgccgtcaggaagggtattccaccgacgacaacgcgcgggcgctctggctcgcgtacgagtggctccactacgcccgcgagcggggcctggaggcggaggcggccgatctcgcgcggctcatcgacatctacttcgcgtttttggcctgggtccagaagcccgacggctggttccacaacaacgtgtcgtacgatcgccgctttgagctggaggttccgtcggacgactgccaagggaggtccgtgtacgcgctggcggtgggcatgtgcgaggagcgcgatccggcccgcctgacggcctacgcgcaagtgcttcgccggggccttgatgcagcccttaggctcacgcacgcacgcggcgtcgcccatgtcgtagcggccgccgcaaggcttttgcgccacgcagagggggtcgagcttcccgaagacgcggcgcccgagttctgggcctttgtccgtcagcgcctgccgggcgtcgtggagcgcggcgctcgcgatctcgtgtcgcggttcgaggcgcacgcacgcggcgactggccttggttcgaggaccgcatgacgtacgacaacgcggtcatgccctgggcgctcttcgaagcctatgcgctcaccggcgaggcccgatggagagaagtcgcggaagcctcgctcgacgggcttctcgcccgcatgcgtgcgcccgagggatggcttcggcccattggcaaccgcggcttcgcggcgcctggcttcaccgccatttgggaccagcagccgctggaaatcgcccagctcgccattgcgtgcgaatcggcctggcgcgcgacgggtgacacggcctatcggcggcttacggccgagtgccagcgctggttctacggtgaaaacgacaaaggggtgccgatggccgatccggccgacggcagttgctgcgacggcctgacgccgcagggtcccaacctgaaccgcggtgcagagtcgacgtggtcgtacctcatcaccgagatccacgtcgagcgggcatttgccgatgatctggacgccgcgcgggcgttcggcgcgtgggtgggcgttccgcgccagaccctcgtgtccgcacggtcgagacgggcgctcggcggctttcaccggtga

SEQ ID NO: 222 - protein, 417 aa, Alicyclobacillus acidocaldarius
MTLMYLLWDTFYDALKLVTGLVALYQIVLSVYGIWHRRRPITHAPQKRFAIIIPAHNEECVIGPLLDSLKRQTYPAHLYDVHVIADNCTDGTAERARAHGAIVHVRENRAEQGKGYAIEWMLARLKEMGARYDAIVMFDADNLVHPDFLAIMNDHLCSGDRVIQGYLDTKNPFDSWISVSLAISYWFDNRLWQYARARLHLPCTLGGTGLCIDYPLLQEMGWKATGLTEDLEFGIRCVRRGIIPVWAHDARVYDEKPTSFAASFRQRLRWQQGHFQCAREHLVPMFLEGLRERNLAKIDMAIYLFQPMRSMLLFAGAMIVLGLHYLSPDPTDAASNPAALMVTNLWVAVNVILFLEVPLALLLERVNWRAYFALPLLPFFLWTWGPVTLQAYFTRSNRTWYHTVHKRAIRLDELRER

SEQ ID NO: 223 - DNA, 1254 bp, Alicyclobacillus acidocaldarius
atgacattgatgtacttgctctgggacacgttctatgacgcgctgaagctcgtcacgggccttgtggcgctgtaccagattgtgctgtccgtgtacggcatctggcaccgcagacggcccatcacgcatgcgccgcagaagcgcttcgccatcatcattccggcgcacaacgaggagtgcgtgatcggcccgctcctcgacagcctgaagcgccagacgtatcccgcgcacctgtacgacgtgcatgtcatcgcggacaactgcacggacggcaccgcggagcgcgcgcgggcgcacggcgccattgtccacgtgcgcgaaaaccgcgcggaacagggcaaggggtacgccatcgaatggatgctggcgcgcctgaaggaaatgggcgctcgatacgacgccatcgtgatgttcgacgcggataatttggttcatccggactttctcgccatcatgaacgaccacctgtgcagcggcgatcgcgtcattcagggatatctggataccaagaatccattcgattcgtggatcagcgtgtcgctcgccatctcctattggttcgacaatcggctgtggcagtacgcccgcgcccgcctgcatctgccgtgtacgctcggtgggaccggcctttgcatcgattatccgctgttgcaggagatgggatggaaggcgacgggcctcaccgaggatctcgagttcgggattcgctgcgtccgccgaggaattatccccgtctgggcgcacgacgcgcgcgtctacgacgagaagccgacgagcttcgcggcgtctttccgccagcgcctgcgctggcagcaggggcatttccaatgtgcacgtgaacacttggtccccatgtttctcgaggggctgcgcgagcggaacttggccaaaatcgacatggccatttacctgtttcagcccatgcggtccatgctgctgtttgcgggcgccatgattgtgctcggccttcactacctgtcgcccgatccgaccgatgcagcgtccaacccggccgcgctcatggtcacgaatctgtgggtcgcggtgaacgtgatcctgtttctcgaggttcccctcgcgctgctgctcgaacgggtgaactggcgggcgtattttgccctgcccctccttccgttctttctctggacctggggccccgtgacgctgcaggcctacttcacgcgcagcaaccggacgtggtaccacacggtgcacaagcgcgccattcgcttggatgagctgcgcgagcggtaa

SEQ ID NO: 224 - protein, 402 aa, Clostridium thermocellum ATCC 27405
MQVVIFIAGCYFFGISIFGWIKRRETSPKEYVPQKKFALIVAAHNEEAVIGHIVDSLFRQNYPRNLFDVYVVADNCTDRTAEIAEEHGAIVYKRYNNSARGKGYALEWMFEKIYNMEEKYDAISVFDADNLVSANYLLEMNKQLCKGHKVVQGYVDSKNPFDSWITLSYSIAFWLSNRIFQLPRYYLGLSCGLCGTGFCISVDVLKEIGWGATCLTEDLEFTMKLALNNYKVAWAHNAVVYDEKPITLKQSWNQRKRWMQGHADCASRYLGPLFKKAFREGDLIAFDCAVYLFQPIRLVFIGLITIMMWIQTVFPESPFYNLKYVFPTEVWSVFVTLQFLYGPLVVLSEKKFNLKVLYGFLIYPFYCITWIPITIQGFMSKNNKDWSHTQHSRKISISDLEK

SEQ ID NO: 225 - protein, 407 aa, Thermosinus carboxydivorans Nor1
MNYIFDYIMIPMQLIIIFFTLYYFIIAIFGIWRRKEEKITTPEKSFAIIIAAHNEEQVIGQLVENLQVLRYPRELYDIFVVADNCKDRTAQIARNAGAIVYERFNLEQRGKGYAMEWMFAKLFRMKRKYDAVVVFDADNLVHPNFLLEMNNRLCKGEKVIQGYLDAKNPHDTWIAGTFAISFWVVNHIWHLAKYNIGLSSVLGGTGMCIATDVLQKFGWGATCLTEDMEFTMKVLLKGIRTTWAHDAIVYDEKPLTFKQSWYQRKRWAQGHFDVAGRYIPRLLYEGFKRRDIRILDGVLHLLQPHFLILSTIFVLLSYIYHIVPFYTNILYMVLPVEVWTVIAIGQYVFPIIVLAKIRAHWKSWLYLIFYPIFVYSWIPITFMGYLHRNDREWSHTQHTRGLSYHDI

SEQ ID NO: 226 - protein, 400 aa, Clostridium cellulolyticum H10
IQILIFIAGCYFFGISIFGWVKRRQKSPQNIIPTKRFALVVAAHNEELVIGHIVDSLFKLNYPKNLYDVFVIADNCTDNTAGIARRFGAKVHIREDASKKGKGHALEWMFHRIFHMDTSYDAIAVFDADNLVSQNFLLEMNKQMCKGFKVVQGYIDSKNPYDSWITCSYSIAFWLSNRIYQLPRYYLKLSCGLCGTGFCIDTSILKTLKWGATCLTEDLEYTMKMALNGVKIGWAHEAVVYDEKPITLKQSWHQRKRWMQGHAECAQKYLGALFKKALFKGDLTSLDCALYLFQPIRFIFVGLMTVMMWVQTVYPQFPLYSVQYVFPVQVWYLMGLFEMFYGPLVILAEKKFSLKVILGFIIYPYYCLTWIPITIQGILEKNNKEWNHTVHTRQISINEL

SEQ ID NO: 227 - protein, 395 aa, Pelotomaculum thermopropionicum SI
EAIFYATQVFLTLFTFYHFIISLYGFYRRHEECLLPPSSRFAIVVAAHNEEKVIGELIRNLNELDYPKELYDVYVVADNCTDSTAKIAREKGAVVFERFNKAERGKPYALEFAFSKIFESGIPYDAVCVFDADNLVDTNFLTVMNAHLLKGEKIIQGYLDTKNAGDTWITKSIYVSYILTNRFLQLSKYNLGLTCALGGTGMCLSVDVLKRYGWGMTSLTEDLEFQTKALLNGIKVTWAHDARVYDEKPLTLMQSWRQRKRWMQGHTNVAGRYVARLVREGIRTRNFAMIDGAVYLIQPYFLMFTGIGLITNIFMGPDQILDRPVWLVVGFFAQFFYFGLGLALERVKPVVYWWLIFYPIFALTWIPVAYVGFAMRKNKEWTHTLHFRNIKHENL

SEQ ID NO: 228 - protein, 397 aa, Desulfitobacterium hafniense Y51
VQLIIIFMTFYYFVLSMFGLFRRPDKKVLEPEKSFALVVAAHNEEAVIGPLVDNLLNLDYPKELYDVFVVADNCTDKTALIAKNAGALVHQRFNNEKRGKGYALEWMFHRLFKLERHYDAVIIFDADNLVNETFLVEMNSKLCQGHQIVQCYLDSKNPYDTWVTNTFSITFWLSNRLLQLARYNTGFLNNVLGGTGMCISTKVLKDLGWGATSLTEDLEFTMKALISGIKTTWAHDAIVYDEKPLTFIQAWNQRKRWAQGQVDVAGRYFFPLIYKAFKERKLMYFDAAVHLFQPALVMIATFFMFVNLISGLQSSYTQVFNVVMPWSGWQILSAFSLVFPVAALALERLPWRAYAGLILYPVFIYSWIPIVFLGFVNRKDKSWSHTKHTRSIKYDDV

SEQ ID NO: 229 - protein, 417 aa, Artificial
  Substituion in SEQ ID NO 222
MTLMYLLWDTFYDALKLVTGLVALYQIVLSVYGIWHRRRPITHAPQKRFAIIIPAHNEECVIGPLLDSLKRQTYPAHLYDVHVIADNCTDGTAERARAHGAIVHVRENRAEQGKGYAIEWMLARLKEMGARYDAIVMFDADNLVHPDFLAIMNDHLCSGDRVIQGYLDTKNPFDSWISVSLAISYWFDNRLWQYARARLHLPCTLGGTGLCIDYPLLQEMGWKATGLTEDLEFGIRCVRRGIIPVWAHDARVYDEKPTSFAASFRQRLRWQQGHFQCAREHLVPMFLEGLRERNLAKIDMAIYLFQPMRSMLLFAGAMIVLGLHYLSPDPTDAASNPAALMVTNLWVAVNVILFLEVPLALLLERINWRAYFALPLLPFFLWTWGPVTLQAYFTRSNRTWYHTVHKRAIRLDELRER

SEQ ID NO: 230 - protein, 417 aa, Artificial
  Substituion in SEQ ID NO 222
MTLMYLLWDTFYDALKLVTGLVALYQIVLSVYGIWHRRRPITHAPQKRFAIIIPAHNEECVIGPLLDSLKRQTYPAHLYDVHVIADNCTDGTAERARAHGAIVHVRENRAEQGKGYAIEWMLARLKEMGARYDAIVMFDADNLVHPDFLAIMNDHLCSGDRVIQGYLDTKNPFDSWISVSLAISYWFDNRLWQYARARLHLPCTLGGTGLCIDYPLLQEMGWKATGLTEDLEFGIRCVRRGIIPVWAHDARVYDEKPTSFAASFRQRLRWQQGHFQCAREHLVPMFLEGLRDRNLAKIDMAIYLFQPMRSMLLFAGAMIVLGLHYLSPDPTDAASNPAALMVTNLWVAVNVILFLEVPLALLLERVNWRAYFALPLLPFFLWTWGPVTLQAYFTRSNRTWYHTVHKRAIRLDELRER

SEQ ID NO: 231 - protein, 417 aa, Artificial
  Substituion in SEQ ID NO 222
MTLMYLLWDTFYDALKLVTGLVALYQIVLSVYGIWHRRRPITHAPQKRFAIIIPAHNEECVIGPLLDSLKRQTYPAHLYDVHVIADNCTDGTAERARAHGAIVHVRENRAEQGKGYAIEWMLARLKEMGARYDAIVMFDADNLVHPDFLAIMNDHLCSGDRVIQGYLDTKNPFDSWISVSLAISYWFDNRLWQYARARLHLPCTLGGTGLCIDYPLLQEMGWKATGLTEDLEFGIRCVRRGIIPVWAHDARVYDEKPTSFAASFRQRLRWQQGHFQCAREHLVPMFLEGLRERNLAKIDMAIYLFQPMRSMLLFAGAMIVLGLHYLSPDPTDAASNPAALMVTQLWVAVNVILFLEVPLALLLERVNWRAYFALPLLPFFLWTWGPVTLQAYFTRSNRTWYHTVHKRAIRLDELRER

SEQ ID NO: 232 - protein, 417 aa, Artificial
  Substituion in SEQ ID NO 222
MTLMYLLWDTFYDALKLVTGLVALYQIVLSVYGIWHRRRPITHAPQKRFAIIIPAHNEECVIGPLLDSLKRQTYPAHLYDVHVIADNCTDGTAERARAHGAIVHVRENRAEQGKGYAIEWMLARLKEMGARYDAIVMFDADNLVHPDFLAIMNDHLCSGDRVIQGYLDTKNPFDSWISVSLAISYWFDNRLWQYARARLHLPCTLGGTGLCIDYPLLQEMGWKATGLTEDLEFGIRCVRRGIIPVWAHDARVYDEKPTSFAASFRQRLRWQQGHFQCAREHLVPMFLEGLRERNLAKIDMAIYLFQPMRSMLLFAGAMIVLGLHYLSPDPTDAASNPAALMVTNLWVAVNVILFLEVPLALLLERVNWRAYFALPLLPFFLWTWGPVTLQAYFTRSNRTWYHTIHKRAIRLDELRER

SEQ ID NO: 233 - protein, 417 aa, Artificial
  Substituion in SEQ ID NO 222
MTLMYLLWDTFYDALKLVTGLVALYQIVLSVYGLWHRRRPITHAPQKRFAIIIPAHNEECVIGPLLDSLKRQTYPAHLYDVHVIADNCTDGTAERARAHGAIVHVRENRAEQGKGYAIEWMLARLKEMGARYDAIVMFDADNLVHPDFLAIMNDHLCSGDRVIQGYLDTKNPFDSWISVSLAISYWFDNRLWQYARARLHLPCTLGGTGLCIDYPLLQEMGWKATGLTEDLEFGIRCVRRGIIPVWAHDARVYDEKPTSFAASFRQRLRWQQGHFQCAREHLVPMFLEGLRERNLAKIDMAIYLFQPMRSMLLFAGAMIVLGLHYLSPDPTDAASNPAALMVTNLWVAVNVILFLEVPLALLLERVNWRAYFALPLLPFFLWTWGPVTLQAYFTRSNRTWYHTVHKRAIRLDELRER

SEQ ID NO: 234 - DNA, 1254 bp, Artificial
  Substituion in SEQ ID NO 223
atgacattgatgtacttgctctgggacacgttctatgacgcgctgaagctcgtcacgggccttgtggcgctgtaccagattgtgctgtccgtgtacggcatctggcaccgcagacggcccatcacgcatgcgccgcagaagcgcttcgccatcatcattccggcgcacaacgaggagtgcgtgatcggcccgctcctcgacagcctgaagcgccagacgtatcccgcgcacctgtacgacgtgcatgtcatcgcggacaactgcacggacggcaccgcggagcgcgcgcgggcgcacggcgccattgtccacgtgcgcgaaaaccgcgcggaacagggcaaggggtacgccatcgaatggatgctggcgcgcctgaaggaaatgggcgctcgatacgacgccatcgtgatgttcgacgcggataatttggttcatccggactttctcgccatcatgaacgaccacctgtgcagcggcgatcgcgtcattcagggatatctggataccaagaatccattcgattcgtggatcagcgtgtcgctcgccatctcctattggttcgacaatcggctgtggcagtacgcccgcgcccgcctgcatctgccgtgtacgctcggtgggaccggcctttgcatcgattatccgctgttgcaggagatgggatggaaggcgacgggcctcaccgaggatctcgagttcgggattcgctgcgtccgccgaggaattatccccgtctgggcgcacgacgcgcgcgtctacgacgagaagccgacgagcttcgcggcgtctttccgccagcgcctgcgctggcagcaggggcatttccaatgtgcacgtgaacacttggtccccatgtttctcgaggggctgcgcgagcggaacttggccaaaatcgacatggccatttacctgtttcagcccatgcggtccatgctgctgtttgcgggcgccatgattgtgctcggccttcactacctgtcgcccgatccgaccgatgcagcgtccaacccggccgcgctcatggtcacgaatctgtgggtcgcggtgaacgtgatcctgtttctcgaggttcccctcgcgctgctgctcgaacggattaactggcgggcgtattttgccctgcccctccttccgttctttctctggacctggggccccgtgacgctgcaggcctacttcacgcgcagcaaccggacgtggtaccacacggtgcacaagcgcgccattcgcttggatgagctgcgcgagcggtaa

SEQ ID NO: 235 - DNA, 1254 bp, Artificial
  Substituion in SEQ ID NO 223
atgacattgatgtacttgctctgggacacgttctatgacgcgctgaagctcgtcacgggccttgtggcgctgtaccagattgtgctgtccgtgtacggcatctggcaccgcagacggcccatcacgcatgcgccgcagaagcgcttcgccatcatcattccggcgcacaacgaggagtgcgtgatcggcccgctcctcgacagcctgaagcgccagacgtatcccgcgcacctgtacgacgtgcatgtcatcgcggacaactgcacggacggcaccgcggagcgcgcgcgggcgcacggcgccattgtccacgtgcgcgaaaaccgcgcggaacagggcaaggggtacgccatcgaatggatgctggcgcgcctgaaggaaatgggcgctcgatacgacgccatcgtgatgttcgacgcggataatttggttcatccggactttctcgccatcatgaacgaccacctgtgcagcggcgatcgcgtcattcagggatatctggataccaagaatccattcgattcgtggatcagcgtgtcgctcgccatctcctattggttcgacaatcggctgtggcagtacgcccgcgcccgcctgcatctgccgtgtacgctcggtgggaccggcctttgcatcgattatccgctgttgcaggagatgggatggaaggcgacgggcctcaccgaggatctcgagttcgggattcgctgcgtccgccgaggaattatccccgtctgggcgcacgacgcgcgcgtctacgacgagaagccgacgagcttcgcggcgtctttccgccagcgcctgcgctggcagcaggggcatttccaatgtgcacgtgaacacttggtccccatgtttctcgaggggctgcgcgatcggaacttggccaaaatcgacatggccatttacctgtttcagcccatgcggtccatgctgctgtttgcgggcgccatgattgtgctcggccttcactacctgtcgcccgatccgaccgatgcagcgtccaacccggccgcgctcatggtcacgaatctgtgggtcgcggtgaacgtgatcctgtttctcgaggttcccctcgcgctgctgctcgaacgggtgaactggcgggcgtattttgccctgcccctccttccgttctttctctggacctggggccccgtgacgctgcaggcctacttcacgcgcagcaaccggacgtggtaccacacggtgcacaagcgcgccattcgcttggatgagctgcgcgagcggtaa

SEQ ID NO: 236 - DNA, 1254 bp, Artificial
  Substituion in SEQ ID NO 223
atgacattgatgtacttgctctgggacacgttctatgacgcgctgaagctcgtcacgggccttgtggcgctgtaccagattgtgctgtccgtgtacggcatctggcaccgcagacggcccatcacgcatgcgccgcagaagcgcttcgccatcatcattccggcgcacaacgaggagtgcgtgatcggcccgctcctcgacagcctgaagcgccagacgtatcccgcgcacctgtacgacgtgcatgtcatcgcggacaactgcacggacggcaccgcggagcgcgcgcgggcgcacggcgccattgtccacgtgcgcgaaaaccgcgcggaacagggcaaggggtacgccatcgaatggatgctggcgcgcctgaaggaaatgggcgctcgatacgacgccatcgtgatgttcgacgcggataatttggttcatccggactttctcgccatcatgaacgaccacctgtgcagcggcgatcgcgtcattcagggatatctggataccaagaatccattcgattcgtggatcagcgtgtcgctcgccatctcctattggttcgacaatcggctgtggcagtacgcccgcgcccgcctgcatctgccgtgtacgctcggtgggaccggcctttgcatcgattatccgctgttgcaggagatgggatggaaggcgacgggcctcaccgaggatctcgagttcgggattcgctgcgtccgccgaggaattatccccgtctgggcgcacgacgcgcgcgtctacgacgagaagccgacgagcttcgcggcgtctttccgccagcgcctgcgctggcagcaggggcatttccaatgtgcacgtgaacacttggtccccatgtttctcgaggggctgcgcgagcggaacttggccaaaatcgacatggccatttacctgtttcagcccatgcggtccatgctgctgtttgcgggcgccatgattgtgctcggccttcactacctgtcgcccgatccgaccgatgcagcgtccaacccggccgcgctcatggtcacgcaactgtgggtcgcggtgaacgtgatcctgtttctcgaggttcccctcgcgctgctgctcgaacgggtgaactggcgggcgtattttgccctgcccctccttccgttctttctctggacctggggccccgtgacgctgcaggcctacttcacgcgcagcaaccggacgtggtaccacacggtgcacaagcgcgccattcgcttggatgagctgcgcgagcggtaa

SEQ ID NO: 237 - DNA, 1254 bp, Artificial
  Substituion in SEQ ID NO 223
atgacattgatgtacttgctctgggacacgttctatgacgcgctgaagctcgtcacgggccttgtggcgctgtaccagattgtgctgtccgtgtacggcatctggcaccgcagacggcccatcacgcatgcgccgcagaagcgcttcgccatcatcattccggcgcacaacgaggagtgcgtgatcggcccgctcctcgacagcctgaagcgccagacgtatcccgcgcacctgtacgacgtgcatgtcatcgcggacaactgcacggacggcaccgcggagcgcgcgcgggcgcacggcgccattgtccacgtgcgcgaaaaccgcgcggaacagggcaaggggtacgccatcgaatggatgctggcgcgcctgaaggaaatgggcgctcgatacgacgccatcgtgatgttcgacgcggataatttggttcatccggactttctcgccatcatgaacgaccacctgtgcagcggcgatcgcgtcattcagggatatctggataccaagaatccattcgattcgtggatcagcgtgtcgctcgccatctcctattggttcgacaatcggctgtggcagtacgcccgcgcccgcctgcatctgccgtgtacgctcggtgggaccggcctttgcatcgattatccgctgttgcaggagatgggatggaaggcgacgggcctcaccgaggatctcgagttcgggattcgctgcgtccgccgaggaattatccccgtctgggcgcacgacgcgcgcgtctacgacgagaagccgacgagcttcgcggcgtctttccgccagcgcctgcgctggcagcaggggcatttccaatgtgcacgtgaacacttggtccccatgtttctcgaggggctgcgcgagcggaacttggccaaaatcgacatggccatttacctgtttcagcccatgcggtccatgctgctgtttgcgggcgccatgattgtgctcggccttcactacctgtcgcccgatccgaccgatgcagcgtccaacccggccgcgctcatggtcacgaatctgtgggtcgcggtgaacgtgatcctgtttctcgaggttcccctcgcgctgctgctcgaacgggtgaactggcgggcgtattttgccctgcccctccttccgttctttctctggacctggggccccgtgacgctgcaggcctacttcacgcgcagcaaccggacgtggtaccacacgattcacaagcgcgccattcgcttggatgagctgcgcgagcggtaa

SEQ ID NO: 238 - DNA, 1254 bp, Artificial
  Substituion in SEQ ID NO 223
atgacattgatgtacttgctctgggacacgttctatgacgcgctgaagctcgtcacgggccttgtggcgctgtaccagattgtgctgtccgtgtacggcttatggcaccgcagacggcccatcacgcatgcgccgcagaagcgcttcgccatcatcattccggcgcacaacgaggagtgcgtgatcggcccgctcctcgacagcctgaagcgccagacgtatcccgcgcacctgtacgacgtgcatgtcatcgcggacaactgcacggacggcaccgcggagcgcgcgcgggcgcacggcgccattgtccacgtgcgcgaaaaccgcgcggaacagggcaaggggtacgccatcgaatggatgctggcgcgcctgaaggaaatgggcgctcgatacgacgccatcgtgatgttcgacgcggataatttggttcatccggactttctcgccatcatgaacgaccacctgtgcagcggcgatcgcgtcattcagggatatctggataccaagaatccattcgattcgtggatcagcgtgtcgctcgccatctcctattggttcgacaatcggctgtggcagtacgcccgcgcccgcctgcatctgccgtgtacgctcggtgggaccggcctttgcatcgattatccgctgttgcaggagatgggatggaaggcgacgggcctcaccgaggatctcgagttcgggattcgctgcgtccgccgaggaattatccccgtctgggcgcacgacgcgcgcgtctacgacgagaagccgacgagcttcgcggcgtctttccgccagcgcctgcgctggcagcaggggcatttccaatgtgcacgtgaacacttggtccccatgtttctcgaggggctgcgcgagcggaacttggccaaaatcgacatggccatttacctgtttcagcccatgcggtccatgctgctgtttgcgggcgccatgattgtgctcggccttcactacctgtcgcccgatccgaccgatgcagcgtccaacccggccgcgctcatggtcacgaatctgtgggtcgcggtgaacgtgatcctgtttctcgaggttcccctcgcgctgctgctcgaacgggtgaactggcgggcgtattttgccctgcccctccttccgttctttctctggacctggggccccgtgacgctgcaggcctacttcacgcgcagcaaccggacgtggtaccacacggtgcacaagcgcgccattcgcttggatgagctgcgcgagcggtaa

SEQ ID NO: 239 - protein, 307 aa, Alicyclobacillus acidocaldarius
MTMRIAVLIPCYNEELTIGKVVQDFRRELPDAEIYVYDNNSRDRTAEVAREAGAIVRRETRQGKGNVVRSMFRDIDADVYVMTDGDDTYPAEFVHDLIRPIIEGEADMCIGDRHSDGSYSKENKRPFHNFGNQLVRKLINTLFHADLRDIMTGYRAFSRRFAKTMPIQSEGFEIETEMTLHALDKRFRILEIPIQYRDRPPGSHSKLNTLSDGIRVLKTVFWIFKDYKPLAFFTAVALILFLAGLGVGIPVLYEYFSFGRIAKIPSAILAVGFMVLATNSLTCGFILDTIVRHHRDYYELLQNEFKG

SEQ ID NO: 240 - DNA, 924 bp, Alicyclobacillus acidocaldarius
gtgaccatgcgaatcgcagtcctcatcccgtgttacaacgaagaactgaccattggaaaagtggttcaggactttaggcgcgaactgcccgacgcggagatttacgtgtacgacaacaactcgcgcgatcgcaccgcggaagtggcgagggaagcgggcgcgattgtgcgaagagagactcgtcagggcaagggaaacgtggtgcgctcgatgttccgcgacatcgacgccgacgtgtacgtcatgaccgacggagacgacacgtacccggcggaattcgtgcacgatctcattcggccgatcatcgaaggagaggccgacatgtgcatcggcgaccgtcactccgacggctcgtactccaaggagaacaagcgccctttccacaacttcggcaaccagttggtgcggaagctgatcaacaccctgtttcacgcagatctccgggacatcatgaccggctaccgggcgttcagccgccgcttcgccaagaccatgcccatccagagcgagggctttgaaatcgagacggaaatgacgctccacgcgctggacaagcgcttccgcatcctcgaaatcccgatccaataccgggatcggccgccgggcagccactccaagttgaacacgctgagcgacggcatccgggtgttgaagaccgtcttttggattttcaaagactacaagccgctcgctttcttcaccgccgtcgccttgatcctgtttttggccggcctcggcgtcggcattcccgtgttgtacgagtacttctcgtttggccgcatcgcgaagatcccgtccgccatcctcgcggtcggattcatggtgctggcgaccaacagcctgacgtgcggctttattctggacaccatcgtccgccatcaccgcgactactacgagctcttgcagaacgaatttaaaggctga

SEQ ID NO: 241 - protein, 304 aa, Clostridium acetobutylicum ATCC 824
MKIAVLIPCYNEELTIKKVITDFKKVLPDAYIYVYDNNSKDNTAAIAKESGAIVVREPRQGKGNVVRSMFKDIDADYYIMVDGDDTYPAEFAKELLKPIINGEADMTIGDRLSNGTYESENKRAFHNFGNKLVKNLIGKLFKNDINDIMTGYRAFNRYFVKTIPVLSSGFEIETEMSIHALDKKFLLKEIPIDYRDRPEGSSSKLNTYKDGLKVIKTILFLFKDYKPLPFFSILALLIFLIGLLVGSPVIIEFVKTHRISKLPSAVLTMGLITSAIMFFVNGLILDTLVKQNNQNYELFLNNYK

SEQ ID NO: 242 - protein, 300 aa, Streptococcus mutans UA159
MTEKIAILLPAYNEEITIQKVISDFKRVLPEADIYVYDNNSKDRTNELARQAGAIVRFESRQGKGNVVRSMFREINADYYIMVDADDTYPADEVQKLLDPLRSGKADMTIGDRLSNGTYAEENKRGFHGFGNNLVRLLVNHLYQGNYQDIMTGYRGFNRLFVKNFPVLSSGFEIETELSIHSLDKRFKLVEVPITYHDRPEGSESKLNTFSDGFKVLCMIFNLFKDYKPLIFFSLVTLFFFILGLIVGVPVVTEFAETGFIAKMPSAILATGFMILAALSFALGFILDTIVRQNRMQYEL

SEQ ID NO: 243 - protein, 300 aa, Streptococcus mutans
MTEKIAVLLPAYNEEITIERVIKDFQNVLPNADIYVYDNNSKDRTNELAKQSGAIVRFEPRQGKGNVVRSMFREIEADYYIMVDADDTYPAAEVNKLLEPLKNGMADMTIGDRLSNGTYSQENKRGFHDFGNNLVKYLINKLYQGHYNDIMTGYRGFNRLFVKNFPVISPGFEIETEMSIHALDKRFKLVEVPITYKDRPEGSESKLNTFSDGFKVLKMIFNLFKDYKPLIFFSLLTVVMFILGLIIGIPVITEFAKTGMIDKLPSAILATGFMILAALSFVSGFILDTVVRQNRMQYEL

SEQ ID NO: 244 - protein, 297 aa, Enterococcus faecium DO
KIAVLIPCYNEEATISTVIADFKRELPEADIYVYDNNSTDRTYELAVQGGAIVKKEPRQGKGNVIRQMFFDIDADYYLMVDGDDTYPAEAVHGLLEKLRSGEADMVIGDRLSNGTYFDENKRPFHDFGNNLVRNTITRMYKTKILDVMTGYRGFNRIFVKSFPIMSSGFQIETELTIHALDKKFKFVEIPIDYRDRPEGSESKLNTFSDGFKVIMMIIKMFKDYKPLLFFGIWTIFFFLFGLVTGIPVIREYMLTSFITRIPSAILSTGLMTLALLSLVTGLILDTVVTNAKKEYEL

SEQ ID NO: 245 - protein, 297 aa, Listeria monocytogenes str. 4b F2365
KVAVLLPCYNEELTIGKVIDDFKKELPNADIYVYDNNSKDKTFEIAKDHGAIVRKEMRQGKGNVVRSMFADIDADYYLMVDGDDTYPAEYCHEILEVLRNKEANMVIGDRLSNGTYTEENKRNFHDFGNSLVRNTINRIFKSNLRDIMTGYRGFDRYFVKTMPVLSPGFEIETEMSIHALENRFLVKEIEIDYRDRPEGSESKLNTFSDGFKVIMTIVRLFKNSRPFLFFNLLASLFVLVGVLVGLPVIIQFAQIGLVLKFPSALLATGLIIMGMLFFICGLILDTIAHRSRQSYFL

SEQ ID NO: 246 - protein, 307 aa, Artificial
  Substituion in SEQ ID NO 239
MTMRIAVLIPCYNEELTIGKVVQDFRRELPDAEIYVYDNNSRDRTAEVAREAGAIVRRETRQGKGNVVRSMFRDIDADVYVMTDGDDTYPAEFVHDLIRPIIEGEADMCIGDRHSDGSYSKENKRPFHNFGNQLVRKLINTLFHADLRDIMTGYRAFSRRFAKTMPIQSEGFEIETEMTLHALDKRFRILEIPIQYRDRPPGSHSKLNTLSDGIRVLKTVFWIFKDYKPLAFFTAVALILFLAGLGVGIPVLYEYFSFGRIAKIPSAILAVGFMILATNSLTCGFILDTIVRHHRDYYELLQNEFKG

SEQ ID NO: 247 - protein, 307 aa, Artificial
  Substituion in SEQ ID NO 239
MTMRIAVLIPCYNEELTIGKVVQDFRRELPDAEIYVYDNNSRDRTAEVAREAGAIVRRETRQGKGNVVRSMFRDIDADVYVMTDGDDTYPAEFVHDLIRPIIEGEADMCIGDRHSDGSYSKENKRPFHNFGNQLVRKLINTLFHADIRDIMTGYRAFSRRFAKTMPIQSEGFEIETEMTLHALDKRFRILEIPIQYRDRPPGSHSKLNTLSDGIRVLKTVFWIFKDYKPLAFFTAVALILFLAGLGVGIPVLYEYFSFGRIAKIPSAILAVGFMVLATNSLTCGFILDTIVRHHRDYYELLQNEFKG

SEQ ID NO: 248 - protein, 307 aa, Artificial
  Substituion in SEQ ID NO 239
MTMRIAVLIPCYNEELTIGKVVNDFRRELPDAEIYVYDNNSRDRTAEVAREAGAIVRRETRQGKGNVVRSMFRDIDADVYVMTDGDDTYPAEFVHDLIRPIIEGEADMCIGDRHSDGSYSKENKRPFHNFGNQLVRKLINTLFHADLRDIMTGYRAFSRRFAKTMPIQSEGFEIETEMTLHALDKRFRILEIPIQYRDRPPGSHSKLNTLSDGIRVLKTVFWIFKDYKPLAFFTAVALILFLAGLGVGIPVLYEYFSFGRIAKIPSAILAVGFMVLATNSLTCGFILDTIVRHHRDYYELLQNEFKG

SEQ ID NO: 249 - protein, 307 aa, Artificial
  Substituion in SEQ ID NO 239
MTMRIAVLIPCYNEELTIGKVVQDFRRELPDAEIYVYDNNSRDRTAEVAREAGAIVRRETRQGKGNVVRSMFRDIDADVYVMTDGDDTYPAEFVHDLIRPIIEGEADMCIGDRHSDGSYSKENKRPFHNFGNQLVRKLINTLFHADLKDIMTGYRAFSRRFAKTMPIQSEGFEIETEMTLHALDKRFRILEIPIQYRDRPPGSHSKLNTLSDGIRVLKTVFWIFKDYKPLAFFTAVALILFLAGLGVGIPVLYEYFSFGRIAKIPSAILAVGFMVLATNSLTCGFILDTIVRHHRDYYELLQNEFKG

SEQ ID NO: 250 - protein, 307 aa, Artificial
  Substituion in SEQ ID NO 239
MTMRIAVLIPCYNEELTIGKVVQDFRRELPDAEIYVYDNNSRDRTAEVAREAGAIVRRETRQGKGNVVRSMFRDIDADVYVMTDGDDTYPAEFVHDLIRPIIEGEADMCIGDRHSDGSYSKENKRPFHNFGNQLVRKLINTLFHADLRDIMTGYRAFSRRFAKTMPIQSEGFEIETEMTLHALDKRFRILEIPIQYRDRPPGSHSKLNTLSDGIRVLKTVFWIFKDYKPLAFFTAVALILFLAGLGVGLPVLYEYFSFGRIAKIPSAILAVGFMVLATNSLTCGFILDTIVRHHRDYYELLQNEFKG

SEQ ID NO: 251 - DNA, 924 bp, Artificial
  Substituion in SEQ ID NO 240
gtgaccatgcgaatcgcagtcctcatcccgtgttacaacgaagaactgaccattggaaaagtggttcaggactttaggcgcgaactgcccgacgcggagatttacgtgtacgacaacaactcgcgcgatcgcaccgcggaagtggcgagggaagcgggcgcgattgtgcgaagagagactcgtcagggcaagggaaacgtggtgcgctcgatgttccgcgacatcgacgccgacgtgtacgtcatgaccgacggagacgacacgtacccggcggaattcgtgcacgatctcattcggccgatcatcgaaggagaggccgacatgtgcatcggcgaccgtcactccgacggctcgtactccaaggagaacaagcgccctttccacaacttcggcaaccagttggtgcggaagctgatcaacaccctgtttcacgcagatctccgggacatcatgaccggctaccgggcgttcagccgccgcttcgccaagaccatgcccatccagagcgagggctttgaaatcgagacggaaatgacgctccacgcgctggacaagcgcttccgcatcctcgaaatcccgatccaataccgggatcggccgccgggcagccactccaagttgaacacgctgagcgacggcatccgggtgttgaagaccgtcttttggattttcaaagactacaagccgctcgctttcttcaccgccgtcgccttgatcctgtttttggccggcctcggcgtcggcattcccgtgttgtacgagtacttctcgtttggccgcatcgcgaagatcccgtccgccatcctcgcggtcggattcatgattctggcgaccaacagcctgacgtgcggctttattctggacaccatcgtccgccatcaccgcgactactacgagctcttgcagaacgaatttaaaggctga

SEQ ID NO: 252 - DNA, 924 bp, Artificial
  Substituion in SEQ ID NO 240
gtgaccatgcgaatcgcagtcctcatcccgtgttacaacgaagaactgaccattggaaaagtggttcaggactttaggcgcgaactgcccgacgcggagatttacgtgtacgacaacaactcgcgcgatcgcaccgcggaagtggcgagggaagcgggcgcgattgtgcgaagagagactcgtcagggcaagggaaacgtggtgcgctcgatgttccgcgacatcgacgccgacgtgtacgtcatgaccgacggagacgacacgtacccggcggaattcgtgcacgatctcattcggccgatcatcgaaggagaggccgacatgtgcatcggcgaccgtcactccgacggctcgtactccaaggagaacaagcgccctttccacaacttcggcaaccagttggtgcggaagctgatcaacaccctgtttcacgcagatattcgggacatcatgaccggctaccgggcgttcagccgccgcttcgccaagaccatgcccatccagagcgagggctttgaaatcgagacggaaatgacgctccacgcgctggacaagcgcttccgcatcctcgaaatcccgatccaataccgggatcggccgccgggcagccactccaagttgaacacgctgagcgacggcatccgggtgttgaagaccgtcttttggattttcaaagactacaagccgctcgctttcttcaccgccgtcgccttgatcctgtttttggccggcctcggcgtcggcattcccgtgttgtacgagtacttctcgtttggccgcatcgcgaagatcccgtccgccatcctcgcggtcggattcatggtgctggcgaccaacagcctgacgtgcggctttattctggacaccatcgtccgccatcaccgcgactactacgagctcttgcagaacgaatttaaaggctga

SEQ ID NO: 253 - DNA, 924 bp, Artificial
  Substituion in SEQ ID NO 240
gtgaccatgcgaatcgcagtcctcatcccgtgttacaacgaagaactgaccattggaaaagtggttaatgactttaggcgcgaactgcccgacgcggagatttacgtgtacgacaacaactcgcgcgatcgcaccgcggaagtggcgagggaagcgggcgcgattgtgcgaagagagactcgtcagggcaagggaaacgtggtgcgctcgatgttccgcgacatcgacgccgacgtgtacgtcatgaccgacggagacgacacgtacccggcggaattcgtgcacgatctcattcggccgatcatcgaaggagaggccgacatgtgcatcggcgaccgtcactccgacggctcgtactccaaggagaacaagcgccctttccacaacttcggcaaccagttggtgcggaagctgatcaacaccctgtttcacgcagatctccgggacatcatgaccggctaccgggcgttcagccgccgcttcgccaagaccatgcccatccagagcgagggctttgaaatcgagacggaaatgacgctccacgcgctggacaagcgcttccgcatcctcgaaatcccgatccaataccgggatcggccgccgggcagccactccaagttgaacacgctgagcgacggcatccgggtgttgaagaccgtcttttggattttcaaagactacaagccgctcgctttcttcaccgccgtcgccttgatcctgtttttggccggcctcggcgtcggcattcccgtgttgtacgagtacttctcgtttggccgcatcgcgaagatcccgtccgccatcctcgcggtcggattcatggtgctggcgaccaacagcctgacgtgcggctttattctggacaccatcgtccgccatcaccgcgactactacgagctcttgcagaacgaatttaaaggctga

SEQ ID NO: 254 - DNA, 924 bp, Artificial
  Substituion in SEQ ID NO 240
gtgaccatgcgaatcgcagtcctcatcccgtgttacaacgaagaactgaccattggaaaagtggttcaggactttaggcgcgaactgcccgacgcggagatttacgtgtacgacaacaactcgcgcgatcgcaccgcggaagtggcgagggaagcgggcgcgattgtgcgaagagagactcgtcagggcaagggaaacgtggtgcgctcgatgttccgcgacatcgacgccgacgtgtacgtcatgaccgacggagacgacacgtacccggcggaattcgtgcacgatctcattcggccgatcatcgaaggagaggccgacatgtgcatcggcgaccgtcactccgacggctcgtactccaaggagaacaagcgccctttccacaacttcggcaaccagttggtgcggaagctgatcaacaccctgtttcacgcagatctcaaagacatcatgaccggctaccgggcgttcagccgccgcttcgccaagaccatgcccatccagagcgagggctttgaaatcgagacggaaatgacgctccacgcgctggacaagcgcttccgcatcctcgaaatcccgatccaataccgggatcggccgccgggcagccactccaagttgaacacgctgagcgacggcatccgggtgttgaagaccgtcttttggattttcaaagactacaagccgctcgctttcttcaccgccgtcgccttgatcctgtttttggccggcctcggcgtcggcattcccgtgttgtacgagtacttctcgtttggccgcatcgcgaagatcccgtccgccatcctcgcggtcggattcatggtgctggcgaccaacagcctgacgtgcggctttattctggacaccatcgtccgccatcaccgcgactactacgagctcttgcagaacgaatttaaaggctga

SEQ ID NO: 255 - DNA, 924 bp, Artificial
  Substituion in SEQ ID NO 240
gtgaccatgcgaatcgcagtcctcatcccgtgttacaacgaagaactgaccattggaaaagtggttcaggactttaggcgcgaactgcccgacgcggagatttacgtgtacgacaacaactcgcgcgatcgcaccgcggaagtggcgagggaagcgggcgcgattgtgcgaagagagactcgtcagggcaagggaaacgtggtgcgctcgatgttccgcgacatcgacgccgacgtgtacgtcatgaccgacggagacgacacgtacccggcggaattcgtgcacgatctcattcggccgatcatcgaaggagaggccgacatgtgcatcggcgaccgtcactccgacggctcgtactccaaggagaacaagcgccctttccacaacttcggcaaccagttggtgcggaagctgatcaacaccctgtttcacgcagatctccgggacatcatgaccggctaccgggcgttcagccgccgcttcgccaagaccatgcccatccagagcgagggctttgaaatcgagacggaaatgacgctccacgcgctggacaagcgcttccgcatcctcgaaatcccgatccaataccgggatcggccgccgggcagccactccaagttgaacacgctgagcgacggcatccgggtgttgaagaccgtcttttggattttcaaagactacaagccgctcgctttcttcaccgccgtcgccttgatcctgtttttggccggcctcggcgtcggcttacccgtgttgtacgagtacttctcgtttggccgcatcgcgaagatcccgtccgccatcctcgcggtcggattcatggtgctggcgaccaacagcctgacgtgcggctttattctggacaccatcgtccgccatcaccgcgactactacgagctcttgcagaacgaatttaaaggctga

SEQ ID NO: 256 - protein, 408 aa, Alicyclobacillus acidocaldarius
MRGSAMMDRAKPRIGRPWRKEALCVDVSVVIPTYNERDNIHPLVERIHQALAPLGISYEIWFVDDSSDDTVAVLRDLEARDPAVHVFHRDHERGLASAVVRGFEKAQGRYLVVMDADLQHPPELLPAIYERLESGIDVVIPSRFVEGGSDGGLGPLRKLISWTARVIGQLALHRLRKISDCTSGFFGLRREVIEGVELNPIGWKILIEVLVKGRYRSVHEIAYEFVARDFGESKMSLKEQWNYFRHLVRLVSQSPPDRRFFLFCLIGLSGVVVNEAVLSLLWYGFHLRDTVASVAASFVAMLNNYFWNDRVTWKSESSGRGWGWKLPVFVGISVVGIAITTLVMRGCEGFGVPVPAGQAIGILVSTAWSYWMNSRVTWRNIEREARGDAIVVTRESVRDSLMRAKTGA

SEQ ID NO: 257 - DNA, 1227 bp, Alicyclobacillus acidocaldarius
gtgcgtggttccgcgatgatggacagggccaagcctcggatcggtaggccttggcgcaaggaggctttgtgcgtggacgtcagtgtggtgatcccgacttacaacgagcgagacaacatccatcccctggtggagcgcatccatcaagctttagcccctctggggatttcctacgagatctggtttgtcgatgacagcagcgacgatacggtcgcagtgcttcgagatctggaggcccgggatcccgccgttcacgtgttccaccgcgatcacgagcgtggcctcgcgagcgcggtcgtgcgtggattcgaaaaggcgcagggcaggtaccttgtcgtgatggacgctgacctgcagcatccgccggagctgttgccggccatctacgagcgtttggagtccgggatcgacgtggtaatcccaagccgtttcgtggaagggggctcggacggcgggttgggcccgctgcgaaagctcatctcgtggaccgcgcgggtcattgggcaactcgcgctccatcgcctgcgcaagatctcggattgcacgagcggtttctttggcctgcggcgcgaagtgattgaaggcgtcgaactgaaccccattggatggaagatcttgatcgaggtgctggtgaaaggccgctatcgcagcgtgcatgagatcgcgtacgagttcgtggcccgcgacttcggcgaatcgaagatgagcctcaaggagcagtggaactactttcgccacctcgtgcgcctggtgagccagagcccgccggatcggcggttctttctgttctgcctcatcggcctgtcgggcgtggtggtgaacgaggcagtcctgagcctcctgtggtacgggttccacctgcgggacaccgtggcttccgtcgccgcttctttcgtggccatgttgaacaactatttttggaacgatcgcgtcacgtggaaatccgagtcctccggacgagggtggggatggaagctgcccgtgttcgtcggcatttcggtcgtcgggatcgccatcacgacgctcgtgatgcgaggatgcgagggctttggcgtgcccgttcccgctggacaggccatcggcatcctggtgtccacagcgtggtcgtattggatgaacagccgcgtgacttggcgaaacatcgagcgcgaagcgcgtggggatgcgattgtggtcacacgggagtcggtgcgggattcgctgatgcgggcgaaaacaggcgcgtga

SEQ ID NO: 258 - protein, 376 aa, Syntrophomonas wolfei subsp. wolfei str. Goettingen
LSIIIPTYNERDNVLRIAEHIGNTLKNSYEIVFVDDSNDDTPEILQYLSKSDPHLRFEHRHKERGLGTAVVRGFEIASGDVIAVMDADLQHPPEVLLSMLKAIESGADIVIPSRFIPGGNDGGLKLHRKIVSATARYIGKALIKKLRPISDSTSGFFMFRKDVIKEAELQPIGWKILIEVLARGKYTRVIEIPYQFQARTAGESKMSAQEQWNYIRHLMRLVKDSPEDRRFFYFSLVGLSGVFVNMLIYFFLTMLNLEVRIAGFCSAFVAMLVNFVLNDKITWAYVKTNSVWSRGSKYIITSLIGIGINVGVLDFFYYQLQFNHLLSNLIGISCAVFWNYTINNLWTWSTAKHNNTIIERWTVQNGCESSVEKTGS

SEQ ID NO: 259 - protein, 349 aa, Thermococcus kodakarensis KOD1
ISVVIPTYNERENLPELVERLSRALQGYEYEIVIVDDDSPDKTWGLAEELARKYPIKVIRRTKEKGLSSAVIRGFKEASGDVFVVMDADLQHPPEKVPELIEAIKRGADIAIASRYVPGGAVKNWYWYRKLISKGAIMIGRVALPRIRNVKDPVSGFFALRREVVEGVELNPVGFKILMEILVKGHYNNVREVPFTFGLRKAGESKLGSRTIVNYLRHIYRLMRWEGEIDRLVKFSLVGLSGVLVNEGFLWAFVEFFGWDKVFSNILATELAILNNFTWNDIWTFRDLKNKPLLKRLVSFHVAALSGALVQWAIYVILMAVGVHYLLANLIGIVVSFIVRFAVNRHVTW

SEQ ID NO: 260 - protein, 348 aa, Pyrococcus furiosus DSM 3638
VSVIIPTYNERENLEELFSRIDNALQGLNYEIVVVDDDSPDRTWEKAQELSSKYPVKVIRRTKEKGLSSAVIRGFKEASGDVFVVMDADLQHPPEVIPKLIEAIKNGSDIAIGSRYVKGGKVENWPFYRKLISKGAIMVGRIALPKIRDIKDPVSGFFALRKEVVEGVELNPIGFKILMEILIKGKYSKVVEVPFTFGIRARGESKLKGKTIFEYLRHIYRLMKWEGEIDRIVKFSIVGLSGILVNEGFLWLFVNLGIPKEIAVIPAVELSILNNFFWNDIWTFKDIRRGSIFSRLLKFHIAALSGAVVNFIVYWILLFLGIHYLIANLVGIVLSFGVRYVINRHVTW

SEQ ID NO: 261 - protein, 349 aa, Pyrococcus horikoshii OT3
VSIIVPTYNERDNLEELFSRISSALKGYDYEIIIVDDDSPDKTWEKAMELSKLYPVKVIRRVNEKGLSSAVIRGFSEASGDVFVVMDADLQHPPEVIPSLLREIEKGNDIAIASRYVKGGKVENWPFYRRLISRGAIIIGRLALPKIAGIKDPVSGFFALKRSVVEGVKLNPIGFKILMEILIKGKYSRVTEVPFTFSTRKFGESKLKGKTMVNYLRHVYRLMKWEGEVDRILKFSIVGLSGVGVNEGFLWLFVNFFHISKELGVIPSTELSILNNFLWNDLWTFKDIKKGSVIERLAKFHVAAFVGAVAQFLVYWILLFLGIHYLLANLFGIGASFVVRYIFNRHITW

SEQ ID NO: 262 - protein, 353 aa, Pyrococcus abyssi GE5
ALIMKVSVIVPTYNERENLEELFSRIDKALKDYDYEIIVVDDDSPDETWKKAQELSSVYPVKVIRRINEKGLSSAVIRGFKEASGDVFVVMDADLQHPPEVIPELLKRIKEGADLAIASRYVKGGRVENWPLYRKLISKGAIMIARVALPKIRSIKDPVSGFFALKRNVVDNVNLNPIGFKILLEILIKGRYSRVEEVPFTFGTRLSGESKLKGKTMLNYLRHVYRLMKWEGEIDRLVKFSIVGLSGVAVNEGFLWLFVKMGIRKEVAVLPSTELSVINNFIWNDLWTFKDLRKGSVLRRFFQFHIAALIGVFAQLLIYWALLFLGVHYLISNLVGIGASFIVRYIFNRHVTW

SEQ ID NO: 263 - protein, 408 aa, Artificial
  Substituion in SEQ ID NO 256
MRGSAMMDRAKPRIGRPWRKEALCVDVSVVIPTYNERDNIHPLVERIHQALAPLGISYEIWFVDDSSDDTVAVLKDLEARDPAVHVFHRDHERGLASAVVRGFEKAQGRYLVVMDADLQHPPELLPAIYERLESGIDVVIPSRFVEGGSDGGLGPLRKLISWTARVIGQLALHRLRKISDCTSGFFGLRREVIEGVELNPIGWKILIEVLVKGRYRSVHEIAYEFVARDFGESKMSLKEQWNYFRHLVRLVSQSPPDRRFFLFCLIGLSGVVVNEAVLSLLWYGFHLRDTVASVAASFVAMLNNYFWNDRVTWKSESSGRGWGWKLPVFVGISVVGIAITTLVMRGCEGFGVPVPAGQAIGILVSTAWSYWMNSRVTWRNIEREARGDAIVVTRESVRDSLMRAKTGA

SEQ ID NO: 264 - protein, 408 aa, Artificial
  Substituion in SEQ ID NO 256
MRGSAMMDRAKPRIGRPWRKEALCVDVSVVIPTYNERDNIHPLVERIHQALAPLGISYEIWFVDDSSDDTVAVLRDLEARDPAVHVFHRDHERGLASAVVRGFEKAQGRYLVVMDADLQHPPELLPAIYERLESGIDVVIPSRFVEGGSDGGLGPLRKLISWTARVIGQLALHRLRKISDCTSGFFGLRREVIEGVELNPIGWKILIEVLVKGRYRSVHEIAYEFVARDFGESKMSLKEQWNYFRHLVRLVSQSPPDRRFFLFCLIGLSGVVVNEAVLSLLWYGFHLRDTVASVAASFVAMLNNYFWNDRVTWKSESSGRGWGWKLPVFVGISVVGIAITTLVMRGCEGFGVPVPAGQAIGILVSTAWSYWMNSRVTWRNIERDARGDAIVVTRESVRDSLMRAKTGA

SEQ ID NO: 265 - protein, 408 aa, Artificial
  Substituion in SEQ ID NO 256
MRGSAMMDRAKPRIGRPWRKEALCVDVSVVIPTYNERDNIHPLVERIHQALAPLGISYEIWFVDDSSDDTVAVLRDLEARDPAVHVFHRDHERGLASAVVRGFEKAQGRYLVVMDADLQHPPELLPAIYERLESGIDVVIPSRFVEGGSDGGLGPLRKLISWTARVIGQLALHRLRKISDCTSGFFGLRREVIEGVELNPIGWKILIEVLVKGRYRSVHEIAYEFVARDFGESKMSLKEQWNYFRHLVRLVSQSPPDRRFFLFCLIGLSGVVVNEAVLSLLWYGFHLRDTVASVAASFVAMLNNYFWNDRVTWKSESSGRGWGWKLPVFVGISVVGIAITTLVMRGCEGFGVPVPAGQAIGILVSTAWSYWMNSRVTWRNIEREARGDAIVVTRESVRDSLMRARTGA

SEQ ID NO: 266 - protein, 408 aa, Artificial
  Substituion in SEQ ID NO 256
MRGSAMMDRAKPRIGRPWRKEALCVDVSVVIPTYNERDNIHPLVERIHQALAPLGISYEIWFVDDSSDDTVAVLRDLEARDPAVHVFHRDHERGLASAVVRGFEKAQGRYLVVMDADLQHPPELLPAIYERLESGIDVVIPSRFVEGGSDGGLGPLRKLISWTARVIGQLALHRLRKISDCTSGFFGLRREVIEGVELNPIGWKILIEVLVKGRYRSVHEIAYEFVARDFGESKMSLKEQWNYFRHLVRLVSQSPPDRRFFLFCLIGLSGVVVNEAVLSLLWYGFHLRDTVASVAASFVAMLNNYFWNDRVTWKSESSGRGWGWKLPVFVGISVVGIAITTLVMRGCEGFGVPVPAGQAIGILVSTAWSYWMNSRVTWRNIDREARGDAIVVTRESVRDSLMRAKTGA

SEQ ID NO: 267 - protein, 408 aa, Artificial
  Substituion in SEQ ID NO 256
MRGSAMMDRAKPRIGRPWRKEALCVDVSVVIPTYNERDNIHPLVERIHQALAPLGISYEIWFVDDSSDDTVAVLRDLEARDPAVHVFHRDHERGLASAVVRGFEKAQGRYLVVMDADLQHPPEILPAIYERLESGIDVVIPSRFVEGGSDGGLGPLRKLISWTARVIGQLALHRLRKISDCTSGFFGLRREVIEGVELNPIGWKILIEVLVKGRYRSVHEIAYEFVARDFGESKMSLKEQWNYFRHLVRLVSQSPPDRRFFLFCLIGLSGVVVNEAVLSLLWYGFHLRDTVASVAASFVAMLNNYFWNDRVTWKSESSGRGWGWKLPVFVGISVVGIAITTLVMRGCEGFGVPVPAGQAIGILVSTAWSYWMNSRVTWRNIEREARGDAIVVTRESVRDSLMRAKTGA

SEQ ID NO: 268 - DNA, 1227 bp, Artificial
  Substituion in SEQ ID NO 257
gtgcgtggttccgcgatgatggacagggccaagcctcggatcggtaggccttggcgcaaggaggctttgtgcgtggacgtcagtgtggtgatcccgacttacaacgagcgagacaacatccatcccctggtggagcgcatccatcaagctttagcccctctggggatttcctacgagatctggtttgtcgatgacagcagcgacgatacggtcgcagtgcttaaagatctggaggcccgggatcccgccgttcacgtgttccaccgcgatcacgagcgtggcctcgcgagcgcggtcgtgcgtggattcgaaaaggcgcagggcaggtaccttgtcgtgatggacgctgacctgcagcatccgccggagctgttgccggccatctacgagcgtttggagtccgggatcgacgtggtaatcccaagccgtttcgtggaagggggctcggacggcgggttgggcccgctgcgaaagctcatctcgtggaccgcgcgggtcattgggcaactcgcgctccatcgcctgcgcaagatctcggattgcacgagcggtttctttggcctgcggcgcgaagtgattgaaggcgtcgaactgaaccccattggatggaagatcttgatcgaggtgctggtgaaaggccgctatcgcagcgtgcatgagatcgcgtacgagttcgtggcccgcgacttcggcgaatcgaagatgagcctcaaggagcagtggaactactttcgccacctcgtgcgcctggtgagccagagcccgccggatcggcggttctttctgttctgcctcatcggcctgtcgggcgtggtggtgaacgaggcagtcctgagcctcctgtggtacgggttccacctgcgggacaccgtggcttccgtcgccgcttctttcgtggccatgttgaacaactatttttggaacgatcgcgtcacgtggaaatccgagtcctccggacgagggtggggatggaagctgcccgtgttcgtcggcatttcggtcgtcgggatcgccatcacgacgctcgtgatgcgaggatgcgagggctttggcgtgcccgttcccgctggacaggccatcggcatcctggtgtccacagcgtggtcgtattggatgaacagccgcgtgacttggcgaaacatcgagcgcgaagcgcgtggggatgcgattgtggtcacacgggagtcggtgcgggattcgctgatgcgggcgaaaacaggcgcgtga

SEQ ID NO: 269 - DNA, 1227 bp, Artificial
  Substituion in SEQ ID NO 257
gtgcgtggttccgcgatgatggacagggccaagcctcggatcggtaggccttggcgcaaggaggctttgtgcgtggacgtcagtgtggtgatcccgacttacaacgagcgagacaacatccatcccctggtggagcgcatccatcaagctttagcccctctggggatttcctacgagatctggtttgtcgatgacagcagcgacgatacggtcgcagtgcttcgagatctggaggcccgggatcccgccgttcacgtgttccaccgcgatcacgagcgtggcctcgcgagcgcggtcgtgcgtggattcgaaaaggcgcagggcaggtaccttgtcgtgatggacgctgacctgcagcatccgccggagctgttgccggccatctacgagcgtttggagtccgggatcgacgtggtaatcccaagccgtttcgtggaagggggctcggacggcgggttgggcccgctgcgaaagctcatctcgtggaccgcgcgggtcattgggcaactcgcgctccatcgcctgcgcaagatctcggattgcacgagcggtttctttggcctgcggcgcgaagtgattgaaggcgtcgaactgaaccccattggatggaagatcttgatcgaggtgctggtgaaaggccgctatcgcagcgtgcatgagatcgcgtacgagttcgtggcccgcgacttcggcgaatcgaagatgagcctcaaggagcagtggaactactttcgccacctcgtgcgcctggtgagccagagcccgccggatcggcggttctttctgttctgcctcatcggcctgtcgggcgtggtggtgaacgaggcagtcctgagcctcctgtggtacgggttccacctgcgggacaccgtggcttccgtcgccgcttctttcgtggccatgttgaacaactatttttggaacgatcgcgtcacgtggaaatccgagtcctccggacgagggtggggatggaagctgcccgtgttcgtcggcatttcggtcgtcgggatcgccatcacgacgctcgtgatgcgaggatgcgagggctttggcgtgcccgttcccgctggacaggccatcggcatcctggtgtccacagcgtggtcgtattggatgaacagccgcgtgacttggcgaaacatcgagcgcgatgcgcgtggggatgcgattgtggtcacacgggagtcggtgcgggattcgctgatgcgggcgaaaacaggcgcgtga

SEQ ID NO: 270 - DNA, 1227 bp, Artificial
  Substituion in SEQ ID NO 257
gtgcgtggttccgcgatgatggacagggccaagcctcggatcggtaggccttggcgcaaggaggctttgtgcgtggacgtcagtgtggtgatcccgacttacaacgagcgagacaacatccatcccctggtggagcgcatccatcaagctttagcccctctggggatttcctacgagatctggtttgtcgatgacagcagcgacgatacggtcgcagtgcttcgagatctggaggcccgggatcccgccgttcacgtgttccaccgcgatcacgagcgtggcctcgcgagcgcggtcgtgcgtggattcgaaaaggcgcagggcaggtaccttgtcgtgatggacgctgacctgcagcatccgccggagctgttgccggccatctacgagcgtttggagtccgggatcgacgtggtaatcccaagccgtttcgtggaagggggctcggacggcgggttgggcccgctgcgaaagctcatctcgtggaccgcgcgggtcattgggcaactcgcgctccatcgcctgcgcaagatctcggattgcacgagcggtttctttggcctgcggcgcgaagtgattgaaggcgtcgaactgaaccccattggatggaagatcttgatcgaggtgctggtgaaaggccgctatcgcagcgtgcatgagatcgcgtacgagttcgtggcccgcgacttcggcgaatcgaagatgagcctcaaggagcagtggaactactttcgccacctcgtgcgcctggtgagccagagcccgccggatcggcggttctttctgttctgcctcatcggcctgtcgggcgtggtggtgaacgaggcagtcctgagcctcctgtggtacgggttccacctgcgggacaccgtggcttccgtcgccgcttctttcgtggccatgttgaacaactatttttggaacgatcgcgtcacgtggaaatccgagtcctccggacgagggtggggatggaagctgcccgtgttcgtcggcatttcggtcgtcgggatcgccatcacgacgctcgtgatgcgaggatgcgagggctttggcgtgcccgttcccgctggacaggccatcggcatcctggtgtccacagcgtggtcgtattggatgaacagccgcgtgacttggcgaaacatcgagcgcgaagcgcgtggggatgcgattgtggtcacacgggagtcggtgcgggattcgctgatgcgggcgcgtacaggcgcgtga

SEQ ID NO: 271 - DNA, 1227 bp, Artificial
  Substituion in SEQ ID NO 257
gtgcgtggttccgcgatgatggacagggccaagcctcggatcggtaggccttggcgcaaggaggctttgtgcgtggacgtcagtgtggtgatcccgacttacaacgagcgagacaacatccatcccctggtggagcgcatccatcaagctttagcccctctggggatttcctacgagatctggtttgtcgatgacagcagcgacgatacggtcgcagtgcttcgagatctggaggcccgggatcccgccgttcacgtgttccaccgcgatcacgagcgtggcctcgcgagcgcggtcgtgcgtggattcgaaaaggcgcagggcaggtaccttgtcgtgatggacgctgacctgcagcatccgccggagctgttgccggccatctacgagcgtttggagtccgggatcgacgtggtaatcccaagccgtttcgtggaagggggctcggacggcgggttgggcccgctgcgaaagctcatctcgtggaccgcgcgggtcattgggcaactcgcgctccatcgcctgcgcaagatctcggattgcacgagcggtttctttggcctgcggcgcgaagtgattgaaggcgtcgaactgaaccccattggatggaagatcttgatcgaggtgctggtgaaaggccgctatcgcagcgtgcatgagatcgcgtacgagttcgtggcccgcgacttcggcgaatcgaagatgagcctcaaggagcagtggaactactttcgccacctcgtgcgcctggtgagccagagcccgccggatcggcggttctttctgttctgcctcatcggcctgtcgggcgtggtggtgaacgaggcagtcctgagcctcctgtggtacgggttccacctgcgggacaccgtggcttccgtcgccgcttctttcgtggccatgttgaacaactatttttggaacgatcgcgtcacgtggaaatccgagtcctccggacgagggtggggatggaagctgcccgtgttcgtcggcatttcggtcgtcgggatcgccatcacgacgctcgtgatgcgaggatgcgagggctttggcgtgcccgttcccgctggacaggccatcggcatcctggtgtccacagcgtggtcgtattggatgaacagccgcgtgacttggcgaaacatcgatcgcgaagcgcgtggggatgcgattgtggtcacacgggagtcggtgcgggattcgctgatgcgggcgaaaacaggcgcgtga

SEQ ID NO: 272 - DNA, 1227 bp, Artificial
  Substituion in SEQ ID NO 257
gtgcgtggttccgcgatgatggacagggccaagcctcggatcggtaggccttggcgcaaggaggctttgtgcgtggacgtcagtgtggtgatcccgacttacaacgagcgagacaacatccatcccctggtggagcgcatccatcaagctttagcccctctggggatttcctacgagatctggtttgtcgatgacagcagcgacgatacggtcgcagtgcttcgagatctggaggcccgggatcccgccgttcacgtgttccaccgcgatcacgagcgtggcctcgcgagcgcggtcgtgcgtggattcgaaaaggcgcagggcaggtaccttgtcgtgatggacgctgacctgcagcatccgccggagattttgccggccatctacgagcgtttggagtccgggatcgacgtggtaatcccaagccgtttcgtggaagggggctcggacggcgggttgggcccgctgcgaaagctcatctcgtggaccgcgcgggtcattgggcaactcgcgctccatcgcctgcgcaagatctcggattgcacgagcggtttctttggcctgcggcgcgaagtgattgaaggcgtcgaactgaaccccattggatggaagatcttgatcgaggtgctggtgaaaggccgctatcgcagcgtgcatgagatcgcgtacgagttcgtggcccgcgacttcggcgaatcgaagatgagcctcaaggagcagtggaactactttcgccacctcgtgcgcctggtgagccagagcccgccggatcggcggttctttctgttctgcctcatcggcctgtcgggcgtggtggtgaacgaggcagtcctgagcctcctgtggtacgggttccacctgcgggacaccgtggcttccgtcgccgcttctttcgtggccatgttgaacaactatttttggaacgatcgcgtcacgtggaaatccgagtcctccggacgagggtggggatggaagctgcccgtgttcgtcggcatttcggtcgtcgggatcgccatcacgacgctcgtgatgcgaggatgcgagggctttggcgtgcccgttcccgctggacaggccatcggcatcctggtgtccacagcgtggtcgtattggatgaacagccgcgtgacttggcgaaacatcgagcgcgaagcgcgtggggatgcgattgtggtcacacgggagtcggtgcgggattcgctgatgcgggcgaaaacaggcgcgtga

SEQ ID NO: 273 - protein, 759 aa, Alicyclobacillus acidocaldarius
MRRIVVLLSACLIVKNEAHVLPRCLGSLQGVADEIVVVDTGSTDDTPRIAESFGARVYHFEWTGDFAVARNESLRYALGEYVLVIDADEFLPKEDGVRLRQALQERRADAYTVDLVNYLGSVARFVRSPGVRVVRVFRRGFSYMGSIHEQILYDVIAKGGQIEVLDVEIHHLGYLAEFVALKGKSDRNLEILNQALAIDPDNFFHITNLMAEYARLGDPKKVVELGERAYDLFQRGRVNQPHLVLRMYRMMIAAHGDLGNYDRVEALAREAELFFPNIPDVPFVHALYVMQRGDWRKAIRLFERSREIGEIRSEIIDTIAGAGSYVAAAKLGELWLLEGDVELAREYFVQSLRENLRQEGTFFFLASLLPLNDPSVFEQLRALASHDPVCLAYLALAGAVWRVDHAWRLINEIEQTPVTAPIVAKLRALGAVLGILPANDVRVDSTVEREIQWYEALFALERGDRDQAERCLRDQPERWERLSEWLTSKQGLCISPILDELLLARVDELLLAWLPRAEDRDLALSRVLASPLREEVWKAAWLGERGWECDFLALGAFRRRDIQASLNWLERGLTYEPTVRRAIVEIDLALCHKNIAHAQEVASQASRLFPESKLLEGIAGSLGVSPRPMRSLDDLLGGGSGLNPHRAYQSSVNSMPLKVKIMKLHERAVECVDQVKALVDQGDIMGARTYIQYVQDIITFLRSNLDTSTEAGKAADAAYAYFYKMLVEWFLQPSKVESEYKEMRDFWQSWADTWAKVEA

SEQ ID NO: 274 - DNA, 2280 bp, Alicyclobacillus acidocaldarius
gtgaggagaatcgtcgtgctactttcggcctgtctcatagtgaaaaacgaagctcatgtgctaccgcgttgcttaggttcgctccaaggcgtagcagatgaaatcgtggtagtagacacaggttctacggatgacactcctcgcatcgccgagtcattcggtgcgcgtgtgtatcattttgagtggactggagactttgcggtagcccgaaacgaatcgttgcgatatgcgctgggcgagtatgtgcttgtgatcgatgctgatgagtttttgccaaaggaggacggtgttcgcctgcgtcaggcgctccaagagaggcgggccgacgcttatactgtggacctcgtcaactacttaggatcagtggctcgttttgtccgttcacccggtgttcgcgtggtgcgcgtctttcgacgcggtttctcgtacatgggttctatccacgaacaaattttgtacgacgtgatcgccaaaggcggtcaaatcgaggttcttgacgtcgagattcatcatttaggttatctagccgagttcgtagcgcttaaaggcaagtcggaccgcaatctcgagatcttaaatcaggccctggcaattgatccggataatttttttcatatcacgaaccttatggccgaatacgcccggttaggtgatccaaaaaaagtcgtggagctgggcgagcgcgcatacgacctttttcagcgcggtcgagttaaccagccgcatctcgttctgcgaatgtatcgcatgatgatcgcagcgcacggcgatcttggcaattatgaccgagtcgaggcactggcgagagaagccgagctattctttccgaatatcccggacgtcccattcgtccatgcactctatgtgatgcaacgcggcgattggcgaaaggcgattcggctgtttgagcgcagtcgtgaaattggtgagattcgatctgagattatcgacaccatagctggcgcgggctcatacgtcgcggctgcgaagctcggcgaactctggctactcgagggcgatgtagaacttgctcgagaatattttgtacagagtttacgtgagaacctgcgtcaggagggcaccttctttttcttagcttcgcttctcccgctgaatgatccaagcgtattcgagcaactccgtgccctcgcgagccacgatccagtctgtcttgcgtatcttgccctcgcaggagcagtatggcgggtcgaccatgcttggcggctcatcaatgaaatcgaacaaacgcccgtgacggcaccaatcgtcgcaaaactgcgcgcactcggcgcggtacttggtattctacccgcaaacgatgtccgagtggattcgacggtcgaacgggaaattcaatggtacgaggcgctctttgcacttgaacgaggagatcgcgaccaggcagagagatgcctacgcgaccaaccggagcgttgggagcgtctgtctgagtggctaacgagcaagcaaggtctttgcattagcccgatcctggacgagttgctgctagctcgtgtcgatgagttgcttcttgcgtggctaccaagggcagaagaccgagatctcgcgctgtcaagggttttggcgtctccgcttcgcgaggaagtctggaaggctgcgtggctcggcgaacgcggctgggagtgcgactttttggccttgggtgcgtttcggcgccgcgacattcaggcaagtctcaactggctcgagcgtggtctcacctacgagcccacagtacggcgggccatcgtcgagatcgatctcgccttatgccacaaaaacatcgctcacgcccaggaagtagcaagccaagcaagtaggttgttccctgaatcgaaactgttggagggcattgcagggagcctaggcgtctcgccgcgaccaatgcgctctttagacgacttgttgggagggggtagtggcttgaatccacatcgcgcctaccaatcgtccgtcaacagcatgccacttaaggtaaagatcatgaagctccatgagcgggccgtagagtgcgtcgatcaagtcaaggctctcgttgatcaaggtgacatcatgggggcccgcacgtacatccagtacgtgcaagacattatcacctttttgcgcagtaacctcgacacgtcgacggaagcaggcaaggcggccgatgcggcatacgcgtacttctataagatgctggttgagtggttcctgcagccatcgaaggtggaaagcgagtacaaggaaatgcgagatttctggcagtcgtgggcggacacgtgggccaaggttgaggcatga

SEQ ID NO: 275 - protein, 364 aa, Thermoanaerobacter tengcongensis MB4
LSLCLITKNEEKNISRCINSVKDIVDEIVVVDTGSTDRTIEIAKSFGAKVIQIKWEDDFSKARNTAIESATGDWILFLDADEEIKKEDVSKIKSLLYDDTVEAYLFKFVNYAGSSINSGLTEINYNYRLFRNNGKLKYIYPVHENLRNIEENRPPIAKKADVTILHYGYLADIRKEKNKSERYIKLISKYLESHPEDKFQHANLAVEYFNIGDYQKALKHLLIATKGMDVNSVNATRLLRYLIGCYIGLKDYSTALKIIKDAKDYYKDIPDFSFLEGLMYMDQKRYEKAIEAFKESLSIGEYDGLFITMGGTGSYRARYMIGLCKEKLNQLNDAVKEYIEVLKENPNYQEVFIKLFDLFIKNEP

SEQ ID NO: 276 - protein, 358 aa, Listeria welshimeri serovar 6b str. SLCC5334
LISICMIVKNEAHILRQSLASFRKFTEEIIIVDTGSTDETKEIAKEFTDFVYDFEWTGNFSDARNFAAKHATGKWILAIDADECLEEESYLQLKKQLKAPTEPIQMAQIISFTGEKGRVTTTNQMARVYKNDGTICFRGVIHEQLEGIDKHAVETGFAPVKIYHYGYMSEIVEKQGKSDRNLRLLEKEVKNNKNSGFVHFNIGQEMNRLGDKKEALKEFTKAFRLRDNNQYIWAKLSAYHISELLEQEKRYEESLAIIEEAKVIWPNVPEFPLKKANILYLHHQLEDAKEIYHSLLDNKVIDYQPIVLYEATNFMPHKMLGTIYLEEKDYTRAMTHFSKAYAENSSDYGVMFQMIMLL

SEQ ID NO: 277 - protein, 345 aa, Bacillus cereus subsp. cytotoxis NVH 391-98
ISACLIVKNEEDMLRKCLESLQGGVDEIVVVDTGSTDTTKEIAKEFTDKVYDFEWTNDFAEARNFAASKASGEWILAIDADECVDPKNLAAAIEEIQSHDNKFDVYAVEINSFSDKYGENLSMNHMQRIYKNNGEFHFSGAIHEQIVEKGEGRQELVFSALKLYHYGYLPNVVKKKNKRKRNMDILKKALKSNNNDGFTYFNYGQELRSLGKTKEALESFIKAYQNKEDVYEEWVSRCLYFIVEMLVELKRYEEAIVIINDAEEVFSTAPDFPFWKGEIYFKQKRFDDAKEVYTHIISNNMIYQNAVFNAGAKTFLPHVRLGEIYTQERQHQQALQHYVEALNEN

SEQ ID NO: 278 - protein, 358 aa, Listeria innocua Clip11262
LISICMIVKNEAHILRQSLASFRKFTEEIIIVDTGSTDDTKEIAKEFTDFVYDFEWTGNFSDARNFAAKHATGKWILAIDADECLEEESYRKLEKQLKSPIEPIQMAQIISFTGEKGRVTTTNQMARVYKNDGTICFRGVIHEQLEAVDKHAIEAGLAEVKIYHYGYMSEIVEKQDKSDRNLRLLEKEVKNNKNSGFVHFNIGQEMNRLGNKKEALKEFSEAFRLRDNNHYIWAKLSAYHISELLEQEKRYDESLAIIEEAKVIWPNVPEFPLKKANILYVNHQLEDAKEIYKSLLENTAIDYQPIVLYEATNFMPHKMLGTIYLEEKDYTRAMTHFSKAYAENSSDYGVMFQMIMLL

SEQ ID NO: 279 - protein, 358 aa, Listeria monocytogenes FSL N3-165
LISICMIVKNEAHILRQSLASFRKFTEEIIIVDTGSTDETKEIAQEFTDFVYDFEWTGNFSDARNFAAKHATGKWILAIDADECLEEESYRKLEKQLKSPTEPIQMAQIISFTGEKGRVTTTNQMARVYKNDGTICFRGVIHEQLEAIDKRPIAAGVAEVKIYHYGYMSEIVEKQDKSDRNLRLLEKEVKNNKNSGFVHFNIGQEMNRLGNKKEALKEFSEAFRLRDHNHYIWAKLSAYHIAELLEQEKRYDESLAIIEEARVIWPNVPEFPLKKANILYVNHQLEDAKEIYQSLLENAAIDYQPIVLYEATNFMPHKMLGTIYLEEKDYTRAMTHFSKAYAENSSDYGVMFQMIMLL

SEQ ID NO: 280 - protein, 759 aa, Artificial
  Substituion in SEQ ID NO 273
MRRIVVLLSACLIVKNEAHVLPRCLGSLQGVADEIVVVDTGSTDDTPRIAESFGARVYHFEWTGDFAVARNESLRYALGEYVLVIDADEFLPKEDGVRLRQALQERRADAYTVDLVNYLGSVARFVRSPGVRVVRVFRRGFSYMGSIHEQILYDVIAKGGQIEVLDVEIHHLGYLAEFVALKGKSDRNLEILNQALAIDPDNFFHITNLMAEYARLGDPKKVVELGERAYDLFQRGRVNQPHLVLRMYRMMIAAHGDLGNYDRVEALAREAELFFPNIPDVPFVHALYVMQRGDWRKAIRLFERSREIGEIRSEIIDTIAGAGSYVAAAKLGELWLLEGDVELAREYFVQSLRENLRQEGTFFFLASLLPLNDPSVFEQLRALASHDPVCLAYLALAGAVWRVDHAWRLINEIEQTPVTAPIVAKLRALGAVLGILPANDVRVDSTVEREIQWYEALFALERGDRDQAERCLRDNPERWERLSEWLTSKQGLCISPILDELLLARVDELLLAWLPRAEDRDLALSRVLASPLREEVWKAAWLGERGWECDFLALGAFRRRDIQASLNWLERGLTYEPTVRRAIVEIDLALCHKNIAHAQEVASQASRLFPESKLLEGIAGSLGVSPRPMRSLDDLLGGGSGLNPHRAYQSSVNSMPLKVKIMKLHERAVECVDQVKALVDQGDIMGARTYIQYVQDIITFLRSNLDTSTEAGKAADAAYAYFYKMLVEWFLQPSKVESEYKEMRDFWQSWADTWAKVEA

SEQ ID NO: 281 - protein, 759 aa, Artificial
  Substituion in SEQ ID NO 273
MRRIVVLLSACLIVKNEAHVLPRCLGSLQGVADEIVVVDTGSTDDTPRIAESFGARVYHFEWTGDFAVARNESLRYALGEYVLVIDADEFLPKEDGVRLRQALQERRADAYTVDLVNYLGSVARFVRSPGVRVVRVFRRGFSYMGSIHEQILYDVIAKGGQIEVLDVEIHHLGYLAEFVALKGKSDRNLEILNQALAIDPDNFFHITNLMAEYARLGDPKKVVELGERAYDLFQRGRVNQPHLVLRMYRMMIAAHGDLGNYDRVEALAREAELFFPNIPDVPFVHALYVMQRGDWRKAIRLFERSREIGEIRSEIIDTIAGAGSYVAAAKLGELWLLEGDVELAREYFVQSLRENLRQEGTFFFLASLLPLNDPSVFEQLRALASHDPVCLAYLALAGAIWRVDHAWRLINEIEQTPVTAPIVAKLRALGAVLGILPANDVRVDSTVEREIQWYEALFALERGDRDQAERCLRDQPERWERLSEWLTSKQGLCISPILDELLLARVDELLLAWLPRAEDRDLALSRVLASPLREEVWKAAWLGERGWECDFLALGAFRRRDIQASLNWLERGLTYEPTVRRAIVEIDLALCHKNIAHAQEVASQASRLFPESKLLEGIAGSLGVSPRPMRSLDDLLGGGSGLNPHRAYQSSVNSMPLKVKIMKLHERAVECVDQVKALVDQGDIMGARTYIQYVQDIITFLRSNLDTSTEAGKAADAAYAYFYKMLVEWFLQPSKVESEYKEMRDFWQSWADTWAKVEA

SEQ ID NO: 282 - protein, 759 aa, Artificial
  Substituion in SEQ ID NO 273
MRRIVVLLSACLIVKNEAHVLPRCLGSLQGVADEIVVVDTGSTDDTPRIAESFGARVYHFEWTGDFAVARNESLRYALGEYVLVIDADEFLPKEDGVRLRQALQERRADAYTVDLVNYLGSVARFVRSPGVRVVRVFRRGFSYMGSIHEQILYDVIAKGGQIEVLDVEIHHLGYLAEFVALKGKSDRNLEILNQALAIDPDNFFHITNLMAEYARLGDPKKVVELGERAYDLFQRGRVNQPHLVLRMYRMMIAAHGDLGNYDRVEALAREAELFFPNIPDVPFVHALYVMQRGDWRKAIRLFERSREIGEIRSEIIDTIAGAGSYVAAAKLGELWLLDGDVELAREYFVQSLRENLRQEGTFFFLASLLPLNDPSVFEQLRALASHDPVCLAYLALAGAVWRVDHAWRLINEIEQTPVTAPIVAKLRALGAVLGILPANDVRVDSTVEREIQWYEALFALERGDRDQAERCLRDQPERWERLSEWLTSKQGLCISPILDELLLARVDELLLAWLPRAEDRDLALSRVLASPLREEVWKAAWLGERGWECDFLALGAFRRRDIQASLNWLERGLTYEPTVRRAIVEIDLALCHKNIAHAQEVASQASRLFPESKLLEGIAGSLGVSPRPMRSLDDLLGGGSGLNPHRAYQSSVNSMPLKVKIMKLHERAVECVDQVKALVDQGDIMGARTYIQYVQDIITFLRSNLDTSTEAGKAADAAYAYFYKMLVEWFLQPSKVESEYKEMRDFWQSWADTWAKVEA

SEQ ID NO: 283 - protein, 759 aa, Artificial
  Substituion in SEQ ID NO 273
MRRIVVLLSACLIVKNEAHVLPRCLGSLQGVADEIVVVDTGSTDDTPRIAESFGARVYHFEWTGDFAVARNESLRYALGEYVLVIDADEFLPKEDGVRLRQALQERRADAYTVDLVNYLGSVARFVRSPGVRVVRVFRRGFSYMGSIHEQILYDVIAKGGQIEVLDVEIHHLGYLAEFVALKGKSDRNLEILNQALAIDPDNFFHITNLMAEYARLGDPKKVVELGERAYDLFQRGRVNQPHLVLRMYRMMIAAHGDLGNYDRVEALAREAELFFPNIPDVPFVHALYVMQRGDWRKAIRLFERSREIGEIRSEIIDTIAGAGSYVAAAKLGELWLLEGDVELAREYFVQSLRENLRQEGTFFFLASLLPLNDPSVFEQLKALASHDPVCLAYLALAGAVWRVDHAWRLINEIEQTPVTAPIVAKLRALGAVLGILPANDVRVDSTVEREIQWYEALFALERGDRDQAERCLRDQPERWERLSEWLTSKQGLCISPILDELLLARVDELLLAWLPRAEDRDLALSRVLASPLREEVWKAAWLGERGWECDFLALGAFRRRDIQASLNWLERGLTYEPTVRRAIVEIDLALCHKNIAHAQEVASQASRLFPESKLLEGIAGSLGVSPRPMRSLDDLLGGGSGLNPHRAYQSSVNSMPLKVKIMKLHERAVECVDQVKALVDQGDIMGARTYIQYVQDIITFLRSNLDTSTEAGKAADAAYAYFYKMLVEWFLQPSKVESEYKEMRDFWQSWADTWAKVEA

SEQ ID NO: 284 - protein, 759 aa, Artificial
  Substituion in SEQ ID NO 273
MRRIVVLLSACLIVKNEAHVLPRCLGSLQGVADEIVVVDTGSTDDTPRIAESFGARVYHFEWTGDFAVARNESLRYALGEYVLVIDADEFLPKEDGVRLRQALQERRADAYTVDLVNYLGSVARFVRSPGVRVVRVFRRGFSYMGSIHEQILYDVIAKGGNIEVLDVEIHHLGYLAEFVALKGKSDRNLEILNQALAIDPDNFFHITNLMAEYARLGDPKKVVELGERAYDLFQRGRVNQPHLVLRMYRMMIAAHGDLGNYDRVEALAREAELFFPNIPDVPFVHALYVMQRGDWRKAIRLFERSREIGEIRSEIIDTIAGAGSYVAAAKLGELWLLEGDVELAREYFVQSLRENLRQEGTFFFLASLLPLNDPSVFEQLRALASHDPVCLAYLALAGAVWRVDHAWRLINEIEQTPVTAPIVAKLRALGAVLGILPANDVRVDSTVEREIQWYEALFALERGDRDQAERCLRDQPERWERLSEWLTSKQGLCISPILDELLLARVDELLLAWLPRAEDRDLALSRVLASPLREEVWKAAWLGERGWECDFLALGAFRRRDIQASLNWLERGLTYEPTVRRAIVEIDLALCHKNIAHAQEVASQASRLFPESKLLEGIAGSLGVSPRPMRSLDDLLGGGSGLNPHRAYQSSVNSMPLKVKIMKLHERAVECVDQVKALVDQGDIMGARTYIQYVQDIITFLRSNLDTSTEAGKAADAAYAYFYKMLVEWFLQPSKVESEYKEMRDFWQSWADTWAKVEA

SEQ ID NO: 285 - DNA, 2280 bp, Artificial
  Substituion in SEQ ID NO 274
gtgaggagaatcgtcgtgctactttcggcctgtctcatagtgaaaaacgaagctcatgtgctaccgcgttgcttaggttcgctccaaggcgtagcagatgaaatcgtggtagtagacacaggttctacggatgacactcctcgcatcgccgagtcattcggtgcgcgtgtgtatcattttgagtggactggagactttgcggtagcccgaaacgaatcgttgcgatatgcgctgggcgagtatgtgcttgtgatcgatgctgatgagtttttgccaaaggaggacggtgttcgcctgcgtcaggcgctccaagagaggcgggccgacgcttatactgtggacctcgtcaactacttaggatcagtggctcgttttgtccgttcacccggtgttcgcgtggtgcgcgtctttcgacgcggtttctcgtacatgggttctatccacgaacaaattttgtacgacgtgatcgccaaaggcggtcaaatcgaggttcttgacgtcgagattcatcatttaggttatctagccgagttcgtagcgcttaaaggcaagtcggaccgcaatctcgagatcttaaatcaggccctggcaattgatccggataatttttttcatatcacgaaccttatggccgaatacgcccggttaggtgatccaaaaaaagtcgtggagctgggcgagcgcgcatacgacctttttcagcgcggtcgagttaaccagccgcatctcgttctgcgaatgtatcgcatgatgatcgcagcgcacggcgatcttggcaattatgaccgagtcgaggcactggcgagagaagccgagctattctttccgaatatcccggacgtcccattcgtccatgcactctatgtgatgcaacgcggcgattggcgaaaggcgattcggctgtttgagcgcagtcgtgaaattggtgagattcgatctgagattatcgacaccatagctggcgcgggctcatacgtcgcggctgcgaagctcggcgaactctggctactcgagggcgatgtagaacttgctcgagaatattttgtacagagtttacgtgagaacctgcgtcaggagggcaccttctttttcttagcttcgcttctcccgctgaatgatccaagcgtattcgagcaactccgtgccctcgcgagccacgatccagtctgtcttgcgtatcttgccctcgcaggagcagtatggcgggtcgaccatgcttggcggctcatcaatgaaatcgaacaaacgcccgtgacggcaccaatcgtcgcaaaactgcgcgcactcggcgcggtacttggtattctacccgcaaacgatgtccgagtggattcgacggtcgaacgggaaattcaatggtacgaggcgctctttgcacttgaacgaggagatcgcgaccaggcagagagatgcctacgcgacaatccggagcgttgggagcgtctgtctgagtggctaacgagcaagcaaggtctttgcattagcccgatcctggacgagttgctgctagctcgtgtcgatgagttgcttcttgcgtggctaccaagggcagaagaccgagatctcgcgctgtcaagggttttggcgtctccgcttcgcgaggaagtctggaaggctgcgtggctcggcgaacgcggctgggagtgcgactttttggccttgggtgcgtttcggcgccgcgacattcaggcaagtctcaactggctcgagcgtggtctcacctacgagcccacagtacggcgggccatcgtcgagatcgatctcgccttatgccacaaaaacatcgctcacgcccaggaagtagcaagccaagcaagtaggttgttccctgaatcgaaactgttggagggcattgcagggagcctaggcgtctcgccgcgaccaatgcgctctttagacgacttgttgggagggggtagtggcttgaatccacatcgcgcctaccaatcgtccgtcaacagcatgccacttaaggtaaagatcatgaagctccatgagcgggccgtagagtgcgtcgatcaagtcaaggctctcgttgatcaaggtgacatcatgggggcccgcacgtacatccagtacgtgcaagacattatcacctttttgcgcagtaacctcgacacgtcgacggaagcaggcaaggcggccgatgcggcatacgcgtacttctataagatgctggttgagtggttcctgcagccatcgaaggtggaaagcgagtacaaggaaatgcgagatttctggcagtcgtgggcggacacgtgggccaaggttgaggcatga

SEQ ID NO: 286 - DNA, 2280 bp, Artificial
  Substituion in SEQ ID NO 274
gtgaggagaatcgtcgtgctactttcggcctgtctcatagtgaaaaacgaagctcatgtgctaccgcgttgcttaggttcgctccaaggcgtagcagatgaaatcgtggtagtagacacaggttctacggatgacactcctcgcatcgccgagtcattcggtgcgcgtgtgtatcattttgagtggactggagactttgcggtagcccgaaacgaatcgttgcgatatgcgctgggcgagtatgtgcttgtgatcgatgctgatgagtttttgccaaaggaggacggtgttcgcctgcgtcaggcgctccaagagaggcgggccgacgcttatactgtggacctcgtcaactacttaggatcagtggctcgttttgtccgttcacccggtgttcgcgtggtgcgcgtctttcgacgcggtttctcgtacatgggttctatccacgaacaaattttgtacgacgtgatcgccaaaggcggtcaaatcgaggttcttgacgtcgagattcatcatttaggttatctagccgagttcgtagcgcttaaaggcaagtcggaccgcaatctcgagatcttaaatcaggccctggcaattgatccggataatttttttcatatcacgaaccttatggccgaatacgcccggttaggtgatccaaaaaaagtcgtggagctgggcgagcgcgcatacgacctttttcagcgcggtcgagttaaccagccgcatctcgttctgcgaatgtatcgcatgatgatcgcagcgcacggcgatcttggcaattatgaccgagtcgaggcactggcgagagaagccgagctattctttccgaatatcccggacgtcccattcgtccatgcactctatgtgatgcaacgcggcgattggcgaaaggcgattcggctgtttgagcgcagtcgtgaaattggtgagattcgatctgagattatcgacaccatagctggcgcgggctcatacgtcgcggctgcgaagctcggcgaactctggctactcgagggcgatgtagaacttgctcgagaatattttgtacagagtttacgtgagaacctgcgtcaggagggcaccttctttttcttagcttcgcttctcccgctgaatgatccaagcgtattcgagcaactccgtgccctcgcgagccacgatccagtctgtcttgcgtatcttgccctcgcaggagcaatttggcgggtcgaccatgcttggcggctcatcaatgaaatcgaacaaacgcccgtgacggcaccaatcgtcgcaaaactgcgcgcactcggcgcggtacttggtattctacccgcaaacgatgtccgagtggattcgacggtcgaacgggaaattcaatggtacgaggcgctctttgcacttgaacgaggagatcgcgaccaggcagagagatgcctacgcgaccaaccggagcgttgggagcgtctgtctgagtggctaacgagcaagcaaggtctttgcattagcccgatcctggacgagttgctgctagctcgtgtcgatgagttgcttcttgcgtggctaccaagggcagaagaccgagatctcgcgctgtcaagggttttggcgtctccgcttcgcgaggaagtctggaaggctgcgtggctcggcgaacgcggctgggagtgcgactttttggccttgggtgcgtttcggcgccgcgacattcaggcaagtctcaactggctcgagcgtggtctcacctacgagcccacagtacggcgggccatcgtcgagatcgatctcgccttatgccacaaaaacatcgctcacgcccaggaagtagcaagccaagcaagtaggttgttccctgaatcgaaactgttggagggcattgcagggagcctaggcgtctcgccgcgaccaatgcgctctttagacgacttgttgggagggggtagtggcttgaatccacatcgcgcctaccaatcgtccgtcaacagcatgccacttaaggtaaagatcatgaagctccatgagcgggccgtagagtgcgtcgatcaagtcaaggctctcgttgatcaaggtgacatcatgggggcccgcacgtacatccagtacgtgcaagacattatcacctttttgcgcagtaacctcgacacgtcgacggaagcaggcaaggcggccgatgcggcatacgcgtacttctataagatgctggttgagtggttcctgcagccatcgaaggtggaaagcgagtacaaggaaatgcgagatttctggcagtcgtgggcggacacgtgggccaaggttgaggcatga

SEQ ID NO: 287 - DNA, 2280 bp, Artificial
  Substituion in SEQ ID NO 274
gtgaggagaatcgtcgtgctactttcggcctgtctcatagtgaaaaacgaagctcatgtgctaccgcgttgcttaggttcgctccaaggcgtagcagatgaaatcgtggtagtagacacaggttctacggatgacactcctcgcatcgccgagtcattcggtgcgcgtgtgtatcattttgagtggactggagactttgcggtagcccgaaacgaatcgttgcgatatgcgctgggcgagtatgtgcttgtgatcgatgctgatgagtttttgccaaaggaggacggtgttcgcctgcgtcaggcgctccaagagaggcgggccgacgcttatactgtggacctcgtcaactacttaggatcagtggctcgttttgtccgttcacccggtgttcgcgtggtgcgcgtctttcgacgcggtttctcgtacatgggttctatccacgaacaaattttgtacgacgtgatcgccaaaggcggtcaaatcgaggttcttgacgtcgagattcatcatttaggttatctagccgagttcgtagcgcttaaaggcaagtcggaccgcaatctcgagatcttaaatcaggccctggcaattgatccggataatttttttcatatcacgaaccttatggccgaatacgcccggttaggtgatccaaaaaaagtcgtggagctgggcgagcgcgcatacgacctttttcagcgcggtcgagttaaccagccgcatctcgttctgcgaatgtatcgcatgatgatcgcagcgcacggcgatcttggcaattatgaccgagtcgaggcactggcgagagaagccgagctattctttccgaatatcccggacgtcccattcgtccatgcactctatgtgatgcaacgcggcgattggcgaaaggcgattcggctgtttgagcgcagtcgtgaaattggtgagattcgatctgagattatcgacaccatagctggcgcgggctcatacgtcgcggctgcgaagctcggcgaactctggctactcgatggcgatgtagaacttgctcgagaatattttgtacagagtttacgtgagaacctgcgtcaggagggcaccttctttttcttagcttcgcttctcccgctgaatgatccaagcgtattcgagcaactccgtgccctcgcgagccacgatccagtctgtcttgcgtatcttgccctcgcaggagcagtatggcgggtcgaccatgcttggcggctcatcaatgaaatcgaacaaacgcccgtgacggcaccaatcgtcgcaaaactgcgcgcactcggcgcggtacttggtattctacccgcaaacgatgtccgagtggattcgacggtcgaacgggaaattcaatggtacgaggcgctctttgcacttgaacgaggagatcgcgaccaggcagagagatgcctacgcgaccaaccggagcgttgggagcgtctgtctgagtggctaacgagcaagcaaggtctttgcattagcccgatcctggacgagttgctgctagctcgtgtcgatgagttgcttcttgcgtggctaccaagggcagaagaccgagatctcgcgctgtcaagggttttggcgtctccgcttcgcgaggaagtctggaaggctgcgtggctcggcgaacgcggctgggagtgcgactttttggccttgggtgcgtttcggcgccgcgacattcaggcaagtctcaactggctcgagcgtggtctcacctacgagcccacagtacggcgggccatcgtcgagatcgatctcgccttatgccacaaaaacatcgctcacgcccaggaagtagcaagccaagcaagtaggttgttccctgaatcgaaactgttggagggcattgcagggagcctaggcgtctcgccgcgaccaatgcgctctttagacgacttgttgggagggggtagtggcttgaatccacatcgcgcctaccaatcgtccgtcaacagcatgccacttaaggtaaagatcatgaagctccatgagcgggccgtagagtgcgtcgatcaagtcaaggctctcgttgatcaaggtgacatcatgggggcccgcacgtacatccagtacgtgcaagacattatcacctttttgcgcagtaacctcgacacgtcgacggaagcaggcaaggcggccgatgcggcatacgcgtacttctataagatgctggttgagtggttcctgcagccatcgaaggtggaaagcgagtacaaggaaatgcgagatttctggcagtcgtgggcggacacgtgggccaaggttgaggcatga

SEQ ID NO: 288 - DNA, 2280 bp, Artificial
  Substituion in SEQ ID NO 274
gtgaggagaatcgtcgtgctactttcggcctgtctcatagtgaaaaacgaagctcatgtgctaccgcgttgcttaggttcgctccaaggcgtagcagatgaaatcgtggtagtagacacaggttctacggatgacactcctcgcatcgccgagtcattcggtgcgcgtgtgtatcattttgagtggactggagactttgcggtagcccgaaacgaatcgttgcgatatgcgctgggcgagtatgtgcttgtgatcgatgctgatgagtttttgccaaaggaggacggtgttcgcctgcgtcaggcgctccaagagaggcgggccgacgcttatactgtggacctcgtcaactacttaggatcagtggctcgttttgtccgttcacccggtgttcgcgtggtgcgcgtctttcgacgcggtttctcgtacatgggttctatccacgaacaaattttgtacgacgtgatcgccaaaggcggtcaaatcgaggttcttgacgtcgagattcatcatttaggttatctagccgagttcgtagcgcttaaaggcaagtcggaccgcaatctcgagatcttaaatcaggccctggcaattgatccggataatttttttcatatcacgaaccttatggccgaatacgcccggttaggtgatccaaaaaaagtcgtggagctgggcgagcgcgcatacgacctttttcagcgcggtcgagttaaccagccgcatctcgttctgcgaatgtatcgcatgatgatcgcagcgcacggcgatcttggcaattatgaccgagtcgaggcactggcgagagaagccgagctattctttccgaatatcccggacgtcccattcgtccatgcactctatgtgatgcaacgcggcgattggcgaaaggcgattcggctgtttgagcgcagtcgtgaaattggtgagattcgatctgagattatcgacaccatagctggcgcgggctcatacgtcgcggctgcgaagctcggcgaactctggctactcgagggcgatgtagaacttgctcgagaatattttgtacagagtttacgtgagaacctgcgtcaggagggcaccttctttttcttagcttcgcttctcccgctgaatgatccaagcgtattcgagcaactcaaagccctcgcgagccacgatccagtctgtcttgcgtatcttgccctcgcaggagcagtatggcgggtcgaccatgcttggcggctcatcaatgaaatcgaacaaacgcccgtgacggcaccaatcgtcgcaaaactgcgcgcactcggcgcggtacttggtattctacccgcaaacgatgtccgagtggattcgacggtcgaacgggaaattcaatggtacgaggcgctctttgcacttgaacgaggagatcgcgaccaggcagagagatgcctacgcgaccaaccggagcgttgggagcgtctgtctgagtggctaacgagcaagcaaggtctttgcattagcccgatcctggacgagttgctgctagctcgtgtcgatgagttgcttcttgcgtggctaccaagggcagaagaccgagatctcgcgctgtcaagggttttggcgtctccgcttcgcgaggaagtctggaaggctgcgtggctcggcgaacgcggctgggagtgcgactttttggccttgggtgcgtttcggcgccgcgacattcaggcaagtctcaactggctcgagcgtggtctcacctacgagcccacagtacggcgggccatcgtcgagatcgatctcgccttatgccacaaaaacatcgctcacgcccaggaagtagcaagccaagcaagtaggttgttccctgaatcgaaactgttggagggcattgcagggagcctaggcgtctcgccgcgaccaatgcgctctttagacgacttgttgggagggggtagtggcttgaatccacatcgcgcctaccaatcgtccgtcaacagcatgccacttaaggtaaagatcatgaagctccatgagcgggccgtagagtgcgtcgatcaagtcaaggctctcgttgatcaaggtgacatcatgggggcccgcacgtacatccagtacgtgcaagacattatcacctttttgcgcagtaacctcgacacgtcgacggaagcaggcaaggcggccgatgcggcatacgcgtacttctataagatgctggttgagtggttcctgcagccatcgaaggtggaaagcgagtacaaggaaatgcgagatttctggcagtcgtgggcggacacgtgggccaaggttgaggcatga

SEQ ID NO: 289 - DNA, 2280 bp, Artificial
  Substituion in SEQ ID NO 274
gtgaggagaatcgtcgtgctactttcggcctgtctcatagtgaaaaacgaagctcatgtgctaccgcgttgcttaggttcgctccaaggcgtagcagatgaaatcgtggtagtagacacaggttctacggatgacactcctcgcatcgccgagtcattcggtgcgcgtgtgtatcattttgagtggactggagactttgcggtagcccgaaacgaatcgttgcgatatgcgctgggcgagtatgtgcttgtgatcgatgctgatgagtttttgccaaaggaggacggtgttcgcctgcgtcaggcgctccaagagaggcgggccgacgcttatactgtggacctcgtcaactacttaggatcagtggctcgttttgtccgttcacccggtgttcgcgtggtgcgcgtctttcgacgcggtttctcgtacatgggttctatccacgaacaaattttgtacgacgtgatcgccaaaggcggtaatatcgaggttcttgacgtcgagattcatcatttaggttatctagccgagttcgtagcgcttaaaggcaagtcggaccgcaatctcgagatcttaaatcaggccctggcaattgatccggataatttttttcatatcacgaaccttatggccgaatacgcccggttaggtgatccaaaaaaagtcgtggagctgggcgagcgcgcatacgacctttttcagcgcggtcgagttaaccagccgcatctcgttctgcgaatgtatcgcatgatgatcgcagcgcacggcgatcttggcaattatgaccgagtcgaggcactggcgagagaagccgagctattctttccgaatatcccggacgtcccattcgtccatgcactctatgtgatgcaacgcggcgattggcgaaaggcgattcggctgtttgagcgcagtcgtgaaattggtgagattcgatctgagattatcgacaccatagctggcgcgggctcatacgtcgcggctgcgaagctcggcgaactctggctactcgagggcgatgtagaacttgctcgagaatattttgtacagagtttacgtgagaacctgcgtcaggagggcaccttctttttcttagcttcgcttctcccgctgaatgatccaagcgtattcgagcaactccgtgccctcgcgagccacgatccagtctgtcttgcgtatcttgccctcgcaggagcagtatggcgggtcgaccatgcttggcggctcatcaatgaaatcgaacaaacgcccgtgacggcaccaatcgtcgcaaaactgcgcgcactcggcgcggtacttggtattctacccgcaaacgatgtccgagtggattcgacggtcgaacgggaaattcaatggtacgaggcgctctttgcacttgaacgaggagatcgcgaccaggcagagagatgcctacgcgaccaaccggagcgttgggagcgtctgtctgagtggctaacgagcaagcaaggtctttgcattagcccgatcctggacgagttgctgctagctcgtgtcgatgagttgcttcttgcgtggctaccaagggcagaagaccgagatctcgcgctgtcaagggttttggcgtctccgcttcgcgaggaagtctggaaggctgcgtggctcggcgaacgcggctgggagtgcgactttttggccttgggtgcgtttcggcgccgcgacattcaggcaagtctcaactggctcgagcgtggtctcacctacgagcccacagtacggcgggccatcgtcgagatcgatctcgccttatgccacaaaaacatcgctcacgcccaggaagtagcaagccaagcaagtaggttgttccctgaatcgaaactgttggagggcattgcagggagcctaggcgtctcgccgcgaccaatgcgctctttagacgacttgttgggagggggtagtggcttgaatccacatcgcgcctaccaatcgtccgtcaacagcatgccacttaaggtaaagatcatgaagctccatgagcgggccgtagagtgcgtcgatcaagtcaaggctctcgttgatcaaggtgacatcatgggggcccgcacgtacatccagtacgtgcaagacattatcacctttttgcgcagtaacctcgacacgtcgacggaagcaggcaaggcggccgatgcggcatacgcgtacttctataagatgctggttgagtggttcctgcagccatcgaaggtggaaagcgagtacaaggaaatgcgagatttctggcagtcgtgggcggacacgtgggccaaggttgaggcatga

SEQ ID NO: 290 - protein, 383 aa, Alicyclobacillus acidocaldarius
MVEFTLQREDWSLHRKGHIDQERHREKVREAIREHLADLVSDESLIMSDGKQIIKIPIRSLEEYRIRYNFQKGKHVGSGSGDTAVGDLVARGKPDADGQPGPGQGEGAGSEPGVDYAEAEVTLEDIQQELFRELELPDLAEKDEADMVVDTVEFRDVRKKGITANIDKKRTLLQALRHAKKDDRVVITPDDLRYKTWETIVKPDSNAVILAMMDLSGSMGLFEKYCARTFFFWMTRFLRTKYANVQIRYIAHHTEAHEVDEEYFFTKGESGGTICSSAYQYALDMVNREYPPERYNIYSIHFSDGDNLTSDNEKCVQLVKELSSVSRMFGYAEVNQYSRSSTLMSAYGKLQIPRFRTYVIRDKSEIYGALRHFFSQQQGVKSA

SEQ ID NO: 291 - DNA, 1152 bp, Alicyclobacillus acidocaldarius
gtggtcgaattcacacttcaacgcgaagactggtcactccaccgcaaagggcatatcgatcaagagcgccatcgcgaaaaggtgcgcgaggccattcgggaacatctcgccgatctcgtcagcgatgaaagcctgatcatgtcggacgggaagcagatcatcaagattcctatccggtcgcttgaggagtaccgcattcggtacaactttcagaaaggcaagcacgttggcagcggatccggtgacacggccgtgggcgatctcgtcgcccgcggcaagccggacgccgacggacagcccggtccgggtcagggcgagggcgccggatcggagccgggggtcgactacgccgaggcggaggtgacgctggaggacatccagcaggagctgttccgggagctcgaacttcccgatctcgccgaaaaggacgaggcggacatggtcgtggacaccgtggaatttcgcgacgtccgcaagaagggcatcacggccaacatcgacaagaaacggaccttgcttcaggcccttcgccacgccaagaaggacgatcgcgtcgtgatcacgccggacgatctgcgctacaagacatgggagaccatcgtcaagccagattcgaacgcggtcatcctcgcgatgatggatctgtcgggatcgatgggcctgttcgagaagtactgcgcaaggaccttcttcttttggatgacgcggtttctgcgcacgaagtacgccaacgtccagattcggtacatcgcccatcataccgaggcgcatgaggtcgacgaggagtactttttcacaaagggcgagagcgggggtaccatctgttcgtccgcgtatcagtatgcgctcgacatggtgaaccgggagtatccgcccgagcggtacaacatttattccatccacttttcggacggcgacaacctgacgtcggacaatgaaaaatgtgtgcagttggtgaaggaactttccagcgtttcgcgcatgtttggctacgcagaggtgaaccaatactcgcgttcgtcgacgttgatgagtgcatacgggaagctccagattcctcgatttcgcacgtacgtgatacgagataaatccgagatctacggtgcgcttcgccacttcttttcccagcagcaaggggtgaagagcgcatga

SEQ ID NO: 292 - protein, 376 aa, Bacillus sp. B14905
FVISQENWSLHRKGHQDQQRHMEKVKDAIKNNLPDLVSEESIVMSNGREVIKIPIRSLDEFKIRYNYDNSKHVGQGQGDSNVGDVVARDGSKANQTQGKGKEAGDKPGQDYYEAEVSLEEIQNVLFHELELPNLQQKEKAEIVTEKIEFNDIRKKGLMGNVDKKRTILNALKRNAMHGKAEITPIHNDDLRFKIWDEVVKPESKAVVLAMMDTSGSMGAFEKYCARSFFFWMTKFLRSKYETVEIEFIAHHTEAKVVTEEEFFTKGESGGTICSSAYKKALELIKEKYSPSRYNIYPVHFSDGENISMDNEKCLKLVAELMDVSSMFGYGEVNQHNRFSTLMYTYKKIDDPKFRHHILRKKGDVYDALKSFFKKNE

SEQ ID NO: 293 - protein, 376 aa, Bacillus halodurans C-125
FVVSQENWTLHRKGYQDQRRHQEKVKEAIRKNLPDLVSEENIIMSNGREVIKIPIRSLDEYKIRYNYDKNKHVGQGDGDSQVGDVIARDPSAGQQGPGKGQGAGDQPGEDYFEAEVSILELEELLFRELELPNLQQKEEDHLVVEHIEFNDIRKKGLMGNIDKRRTILSAIKRNALEGRPGLIPIYNDDLRFKTWNEVVRPESKAVVLAMMDTSGSMGRWEKYMARSFFFWMTRFLRTKYETVDIEFIAHHTEAKVVSEEDFFSKGESGGTICSSAYRKALELINEKYDPARYNIYPFHFSDGDNLTSDNARCLKLVHELMESSSMFGYGEVNQYSRHSTLMNAYKNLKDPRFRSYVLKEKGDVYRAMKTFFKKEE

SEQ ID NO: 294 - protein, 377 aa, Bacillus pumilus SAFR-032
QFIVSQEDWSLHRKGYDDQQRHQKKVKEAIKNNLPDLVTEESIIMSNGKDVVKIPIRSLDEYKIRYNYDKNKHVGQGDGDSEVGDIVARDGSDSKQGQGKGQSAGDQAGEDYYEAEVSLMDLEEALFRELELPNLKQKELDDIIVEQIEFNDIRKTGLTGNIHKKRTMLSAFKRNAMTGSPSFYPIYPEDIKYKTWNEVTKPESKAVVLAMMDTSGSMGLWEKYMARSFFFWMTRFLRTKYETVDIEFIAHHTEAKVVDEEHFFSRGESGGTICSSVYRKALELIDERYPPSRYNIYPFHFSDGDNLTSDNARCVKLVSEIMKKANLFCYGEVNQYNRHSTLMSAYKHIQDEKFKHYILKQKSDVFLALKKFFQQEE

SEQ ID NO: 295 - protein, 377 aa, Bacillus sp. NRRL B-14911
QFVISEEDWSLHRKGHDDQQRHQEKVQDAIRNNLPDLITEESIIMSNGREVVKIPIRSLDEYKIRYNYDKNKHVGQGDGDSQVGDVVARDGSSGQKGPGKGQGAGDQPGEDYFEAEVSMMELEEALFKQLELPNLKRKEQEEHLVENIEFNDIRKTGLMGNIDKKRTMMTAFKRNAMTGKPAFYPIYQEDLKFKTWNEIVKPDSKAVVLAMMDTSGSMGLWEKYMARSFFFWMTRFLRTKYETVEIEFIAHHTEAKVVSEEDFFSKGESGGTICSSAYRKALELINEKYNPRRFNIYPFHFSDGDNLTSDNARCVKLVEELIAVSSMFGYGEVNQYNRHSTLMSAYKNIKNEHFRYYILKQKADVFHAMKSFFQNEE

SEQ ID NO: 296 - protein, 374 aa, Paenibacillus larvae subsp. larvae BRL-230010
FIVSRENWSLHRKGYQDQTRHQQKIKDAIKQNLPDLVTEENIILSNGKQIIKIPIRSLDEYRFRFNYNKSKHVGQGDGDSQVGDVLGIDPYTQQGKGAGAGDQAGEDYYEAEVDMEELQSLLFEELELPYLNPKERLDISTQDIIFNDIRKKGIMSNIDKKRTILENIRRNASSGTPGIHGISPDDLRFKTWDEIEKPHSNALILAMMDTSGSMGSFEKYIARSFFFWMTRFLRSKYEHVDIVFIAHHTEARIVSEEEFFTKGESGGTICSSAYQAALDVIDRSYPPSKYNIYPFHFSDGDNLTSDNERCVKLIQRLMERSNMFGYGEVNQYNRSSTLMQTYRHIQDPKFLYYIIREKGEVYKALKTFFAKPEG

SEQ ID NO: 297 - protein, 383 aa, Artificial
  Substituion in SEQ ID NO 290
MVEFTLQREDWSLHRKGHIDQERHREKVREAIREHLADLVSDESLIMSDGKQIIKIPIRSLEEYRIRYNFQKGKHVGSGSGDTAVGDLVARGKPDADGQPGPGQGEGAGSEPGVDYAEAEVTLEDIQQELFRELELPDLAEKDEADMVVDTVEFRDVRKKGITANIDKKRTLLQALRHAKKDDRVVITPDDLRYKTWETIVKPDSNAVILAMMDLSGSMGLFEKYCARTFFFWMTRFLRTKYANVQIRYIAHHTEAHEVDEEYFFTKGESGGTICSSAYQYALDMVNREYPPERYNIYSIHFSDGDNLTSDNEKCVQLVKELSSVSRMFGYAEVNQYSRSSTLMSAYGKLQIPRFKTYVIRDKSEIYGALRHFFSQQQGVKSA

SEQ ID NO: 298 - protein, 383 aa, Artificial
  Substituion in SEQ ID NO 290
MVEFTLQREDWSLHRKGHIDQERHREKVREAIREHLADLVSDESLIMSDGKQIIKIPIRSLEEYRIRYNFQKGKHVGSGSGDTAVGDLVARGKPEADGQPGPGQGEGAGSEPGVDYAEAEVTLEDIQQELFRELELPDLAEKDEADMVVDTVEFRDVRKKGITANIDKKRTLLQALRHAKKDDRVVITPDDLRYKTWETIVKPDSNAVILAMMDLSGSMGLFEKYCARTFFFWMTRFLRTKYANVQIRYIAHHTEAHEVDEEYFFTKGESGGTICSSAYQYALDMVNREYPPERYNIYSIHFSDGDNLTSDNEKCVQLVKELSSVSRMFGYAEVNQYSRSSTLMSAYGKLQIPRFRTYVIRDKSEIYGALRHFFSQQQGVKSA

SEQ ID NO: 299 - protein, 383 aa, Artificial
  Substituion in SEQ ID NO 290
MVEFTLQREDWSLHRKGHIDQERHREKVREAIREHLADLVSDESLIMSDGKQIIKIPIRSLEEYRIRYNFQKGKHVGSGSGDTAVGDLVARGKPDADGQPGPGQGEGAGSEPGVDYAEAEVTLEDIQQELFRELELPDLAEKDEADMVVDTVEFRDVRKKGITANIDKKRTLLQALRHAKKDDRVVITPDDLRYKTWETIVKPDSNAVILAMMDLSGSMGLFEKYCARTFFFWMTRFLRTKYANVQIKYIAHHTEAHEVDEEYFFTKGESGGTICSSAYQYALDMVNREYPPERYNIYSIHFSDGDNLTSDNEKCVQLVKELSSVSRMFGYAEVNQYSRSSTLMSAYGKLQIPRFRTYVIRDKSEIYGALRHFFSQQQGVKSA

SEQ ID NO: 300 - protein, 383 aa, Artificial
  Substituion in SEQ ID NO 290
MVEFTLQREDWSLHRKGHIDQERHREKVREAIREHLADLVSDESLIMSDGKQIIKIPIRSLEEYRIRYNFQKGKHVGSGSGDTAVGDLVARGKPDADGQPGPGQGEGAGSEPGVDYAEAEVTLEDIQQELFRELELPDLAEKDEADMVVDTVEFRDVRKKGITANIDKKRTLLQALRHAKKDDRVVITPDDLRYKTWETIVKPDSNAVILAMMDLSGSMGLFEKYCARTFFFWMTRFLRTKYANVQIRYIAHHTEAHEVDEEYFFTKGESGGTICSSAYQYALDMVNREYPPERYNIYSIHFSDGDNLTSDNEKCVQLVKELSSVSRMFGYAEVNQYSRSSTLMSAYGKLQIPRFRTYVIRDKSEIYGALRHFFSQQQGVRSA

SEQ ID NO: 301 - protein, 383 aa, Artificial
  Substituion in SEQ ID NO 290
MVEFTLQREDWSLHRKGHIDQERHREKVREAIREHLADLVSDESLIMSDGKQIIKIPIRSLEEYRIRYNFQKGKHVGSGSGDTAVGDLVARGKPDADGQPGPGQGEGAGSEPGVDYAEAEVTLEDIQQELFRELELPDLAEKDEADMVVDTVEFRDVRKKGITANIDKKRTLLQALRHAKKDDRVVITPDDLRYKTWETIVKPDSNAVILAMMDLSGSMGLFEKYCARTFFFWMTRFLRTKYAQVQIRYIAHHTEAHEVDEEYFFTKGESGGTICSSAYQYALDMVNREYPPERYNIYSIHFSDGDNLTSDNEKCVQLVKELSSVSRMFGYAEVNQYSRSSTLMSAYGKLQIPRFRTYVIRDKSEIYGALRHFFSQQQGVKSA

SEQ ID NO: 302 - DNA, 1152 bp, Artificial
  Substituion in SEQ ID NO 291
gtggtcgaattcacacttcaacgcgaagactggtcactccaccgcaaagggcatatcgatcaagagcgccatcgcgaaaaggtgcgcgaggccattcgggaacatctcgccgatctcgtcagcgatgaaagcctgatcatgtcggacgggaagcagatcatcaagattcctatccggtcgcttgaggagtaccgcattcggtacaactttcagaaaggcaagcacgttggcagcggatccggtgacacggccgtgggcgatctcgtcgcccgcggcaagccggacgccgacggacagcccggtccgggtcagggcgagggcgccggatcggagccgggggtcgactacgccgaggcggaggtgacgctggaggacatccagcaggagctgttccgggagctcgaacttcccgatctcgccgaaaaggacgaggcggacatggtcgtggacaccgtggaatttcgcgacgtccgcaagaagggcatcacggccaacatcgacaagaaacggaccttgcttcaggcccttcgccacgccaagaaggacgatcgcgtcgtgatcacgccggacgatctgcgctacaagacatgggagaccatcgtcaagccagattcgaacgcggtcatcctcgcgatgatggatctgtcgggatcgatgggcctgttcgagaagtactgcgcaaggaccttcttcttttggatgacgcggtttctgcgcacgaagtacgccaacgtccagattcggtacatcgcccatcataccgaggcgcatgaggtcgacgaggagtactttttcacaaagggcgagagcgggggtaccatctgttcgtccgcgtatcagtatgcgctcgacatggtgaaccgggagtatccgcccgagcggtacaacatttattccatccacttttcggacggcgacaacctgacgtcggacaatgaaaaatgtgtgcagttggtgaaggaactttccagcgtttcgcgcatgtttggctacgcagaggtgaaccaatactcgcgttcgtcgacgttgatgagtgcatacgggaagctccagattcctcgatttaaaacgtacgtgatacgagataaatccgagatctacggtgcgcttcgccacttcttttcccagcagcaaggggtgaagagcgcatga

SEQ ID NO: 303 - DNA, 1152 bp, Artificial
  Substituion in SEQ ID NO 291
gtggtcgaattcacacttcaacgcgaagactggtcactccaccgcaaagggcatatcgatcaagagcgccatcgcgaaaaggtgcgcgaggccattcgggaacatctcgccgatctcgtcagcgatgaaagcctgatcatgtcggacgggaagcagatcatcaagattcctatccggtcgcttgaggagtaccgcattcggtacaactttcagaaaggcaagcacgttggcagcggatccggtgacacggccgtgggcgatctcgtcgcccgcggcaagccggaagccgacggacagcccggtccgggtcagggcgagggcgccggatcggagccgggggtcgactacgccgaggcggaggtgacgctggaggacatccagcaggagctgttccgggagctcgaacttcccgatctcgccgaaaaggacgaggcggacatggtcgtggacaccgtggaatttcgcgacgtccgcaagaagggcatcacggccaacatcgacaagaaacggaccttgcttcaggcccttcgccacgccaagaaggacgatcgcgtcgtgatcacgccggacgatctgcgctacaagacatgggagaccatcgtcaagccagattcgaacgcggtcatcctcgcgatgatggatctgtcgggatcgatgggcctgttcgagaagtactgcgcaaggaccttcttcttttggatgacgcggtttctgcgcacgaagtacgccaacgtccagattcggtacatcgcccatcataccgaggcgcatgaggtcgacgaggagtactttttcacaaagggcgagagcgggggtaccatctgttcgtccgcgtatcagtatgcgctcgacatggtgaaccgggagtatccgcccgagcggtacaacatttattccatccacttttcggacggcgacaacctgacgtcggacaatgaaaaatgtgtgcagttggtgaaggaactttccagcgtttcgcgcatgtttggctacgcagaggtgaaccaatactcgcgttcgtcgacgttgatgagtgcatacgggaagctccagattcctcgatttcgcacgtacgtgatacgagataaatccgagatctacggtgcgcttcgccacttcttttcccagcagcaaggggtgaagagcgcatga

SEQ ID NO: 304 - DNA, 1152 bp, Artificial
  Substituion in SEQ ID NO 291
gtggtcgaattcacacttcaacgcgaagactggtcactccaccgcaaagggcatatcgatcaagagcgccatcgcgaaaaggtgcgcgaggccattcgggaacatctcgccgatctcgtcagcgatgaaagcctgatcatgtcggacgggaagcagatcatcaagattcctatccggtcgcttgaggagtaccgcattcggtacaactttcagaaaggcaagcacgttggcagcggatccggtgacacggccgtgggcgatctcgtcgcccgcggcaagccggacgccgacggacagcccggtccgggtcagggcgagggcgccggatcggagccgggggtcgactacgccgaggcggaggtgacgctggaggacatccagcaggagctgttccgggagctcgaacttcccgatctcgccgaaaaggacgaggcggacatggtcgtggacaccgtggaatttcgcgacgtccgcaagaagggcatcacggccaacatcgacaagaaacggaccttgcttcaggcccttcgccacgccaagaaggacgatcgcgtcgtgatcacgccggacgatctgcgctacaagacatgggagaccatcgtcaagccagattcgaacgcggtcatcctcgcgatgatggatctgtcgggatcgatgggcctgttcgagaagtactgcgcaaggaccttcttcttttggatgacgcggtttctgcgcacgaagtacgccaacgtccagattaaatacatcgcccatcataccgaggcgcatgaggtcgacgaggagtactttttcacaaagggcgagagcgggggtaccatctgttcgtccgcgtatcagtatgcgctcgacatggtgaaccgggagtatccgcccgagcggtacaacatttattccatccacttttcggacggcgacaacctgacgtcggacaatgaaaaatgtgtgcagttggtgaaggaactttccagcgtttcgcgcatgtttggctacgcagaggtgaaccaatactcgcgttcgtcgacgttgatgagtgcatacgggaagctccagattcctcgatttcgcacgtacgtgatacgagataaatccgagatctacggtgcgcttcgccacttcttttcccagcagcaaggggtgaagagcgcatga

SEQ ID NO: 305 - DNA, 1152 bp, Artificial
  Substituion in SEQ ID NO 291
gtggtcgaattcacacttcaacgcgaagactggtcactccaccgcaaagggcatatcgatcaagagcgccatcgcgaaaaggtgcgcgaggccattcgggaacatctcgccgatctcgtcagcgatgaaagcctgatcatgtcggacgggaagcagatcatcaagattcctatccggtcgcttgaggagtaccgcattcggtacaactttcagaaaggcaagcacgttggcagcggatccggtgacacggccgtgggcgatctcgtcgcccgcggcaagccggacgccgacggacagcccggtccgggtcagggcgagggcgccggatcggagccgggggtcgactacgccgaggcggaggtgacgctggaggacatccagcaggagctgttccgggagctcgaacttcccgatctcgccgaaaaggacgaggcggacatggtcgtggacaccgtggaatttcgcgacgtccgcaagaagggcatcacggccaacatcgacaagaaacggaccttgcttcaggcccttcgccacgccaagaaggacgatcgcgtcgtgatcacgccggacgatctgcgctacaagacatgggagaccatcgtcaagccagattcgaacgcggtcatcctcgcgatgatggatctgtcgggatcgatgggcctgttcgagaagtactgcgcaaggaccttcttcttttggatgacgcggtttctgcgcacgaagtacgccaacgtccagattcggtacatcgcccatcataccgaggcgcatgaggtcgacgaggagtactttttcacaaagggcgagagcgggggtaccatctgttcgtccgcgtatcagtatgcgctcgacatggtgaaccgggagtatccgcccgagcggtacaacatttattccatccacttttcggacggcgacaacctgacgtcggacaatgaaaaatgtgtgcagttggtgaaggaactttccagcgtttcgcgcatgtttggctacgcagaggtgaaccaatactcgcgttcgtcgacgttgatgagtgcatacgggaagctccagattcctcgatttcgcacgtacgtgatacgagataaatccgagatctacggtgcgcttcgccacttcttttcccagcagcaaggggtgcgtagcgcatga

SEQ ID NO: 306 - DNA, 1152 bp, Artificial
  Substituion in SEQ ID NO 291
gtggtcgaattcacacttcaacgcgaagactggtcactccaccgcaaagggcatatcgatcaagagcgccatcgcgaaaaggtgcgcgaggccattcgggaacatctcgccgatctcgtcagcgatgaaagcctgatcatgtcggacgggaagcagatcatcaagattcctatccggtcgcttgaggagtaccgcattcggtacaactttcagaaaggcaagcacgttggcagcggatccggtgacacggccgtgggcgatctcgtcgcccgcggcaagccggacgccgacggacagcccggtccgggtcagggcgagggcgccggatcggagccgggggtcgactacgccgaggcggaggtgacgctggaggacatccagcaggagctgttccgggagctcgaacttcccgatctcgccgaaaaggacgaggcggacatggtcgtggacaccgtggaatttcgcgacgtccgcaagaagggcatcacggccaacatcgacaagaaacggaccttgcttcaggcccttcgccacgccaagaaggacgatcgcgtcgtgatcacgccggacgatctgcgctacaagacatgggagaccatcgtcaagccagattcgaacgcggtcatcctcgcgatgatggatctgtcgggatcgatgggcctgttcgagaagtactgcgcaaggaccttcttcttttggatgacgcggtttctgcgcacgaagtacgcccaagtccagattcggtacatcgcccatcataccgaggcgcatgaggtcgacgaggagtactttttcacaaagggcgagagcgggggtaccatctgttcgtccgcgtatcagtatgcgctcgacatggtgaaccgggagtatccgcccgagcggtacaacatttattccatccacttttcggacggcgacaacctgacgtcggacaatgaaaaatgtgtgcagttggtgaaggaactttccagcgtttcgcgcatgtttggctacgcagaggtgaaccaatactcgcgttcgtcgacgttgatgagtgcatacgggaagctccagattcctcgatttcgcacgtacgtgatacgagataaatccgagatctacggtgcgcttcgccacttcttttcccagcagcaaggggtgaagagcgcatga

SEQ ID NO: 307 - protein, 959 aa, Alicyclobacillus acidocaldarius
MKRPWSAALAALIALGTGASPAWAAAHPSPKVPAGAAGRVRAADVVSTPISMEIQVIHDALTVPELAAVQAAAQAASNLSTSQWLQWLYPNATPTTSAQSQAAQAVANLFNLATYGAVSTRGSNAAQILQTLQSISPLLSPRAVGLFYQSFLTEIGQSSKAILARQASSSIVGNALAQAASLSPTISAYLRQNGLSPSDLARTWSSFETQVDPQGAAQTALATRICTNALGFGAPTASATITVNTAARLRTVPATAFGLNAAVWDSGLNSQTVISEVQALHPALIRWPGGSISDVYNWETNTRNDGGYVNPNDTFDNFMQFVNAVGASPIITVNYGTGTPQLAADWVKYADVTHHDNVLYWEIGNEIYGNGYYNGNGWEADDHAVPNQPQKGNPGLSPQAYAQNALQFIQAMRAVDPNIKIGAVLTMPYNWPWGATVNGNDDWNTVVLKALGPYIDFVDVHWYPETPGQETDAGLLADTDQIPAMVAELKREINAYAGSNAKNIQIFVTETNSVSYNPGQQSTNLPEALFLADDLAGFVQAGAANVDWWDLLNGAEDNYTSPSLYGQNLFGDYGLLSSGQATPKGVQEPPQYTPLPPYYGFQLVSDFARPGDTLLGSASSQSDIDVHAVREPNGDIALMLVNRSPSTIYSADLNVLGVGPYAITKALVYGEGSSAVSPALTLPTAHSVKLMPYSGVDLVLHPLIPAPHAAASVTDTLALSSPTVTAGGSETVTASFSSDRPVRDATVELELYDSTGDLVANHEMTGVDIAPGQPVSESWTFAAPAANGTYTVEAFAFDPATGATYDADTTGATITVNQPPAAKYGDIVTKNTVITVNGTTYTVPAPDASGHYPSGTNISIAPGDTVTIQTTFANVSSTDALQNGLIDMEVDGQNGAIFQKYWPSTTLLPGQTETVTATWQVPSSVSAGTYPLNFQAFDTSNWTGNCYFTNGGVVNFVVN

SEQ ID NO: 308 - protein, 959 aa, Alicyclobacillus acidocaldarius; identical to SEQ ID NO: 307
  CARBOHYD (174)..(174)
  CARBOHYD (193)..(193)
  CARBOHYD (297)..(297)
  CARBOHYD (393)..(393)
  CARBOHYD (404)..(404)

SEQ ID NO: 309 - protein, 378 aa, Alicyclobacillus acidocaldarius
MKVALVHDWLVDFAGSERVLFELAKLFPDAPIYTSVYSERALANVFPKERVRTSFLQKIPLSVKRYRSLLPFLPFAFEMFDLTGYDVIISSSHACAKGVVAGSNSIHICYCHTPMRYAWSHYHQYLRGVRGTLKRATVGAILSWLRTWDFIAAQRVDFFIANSSEVQKRIRHYYRRDAVVIHPPISAPEGENGDPERADFYLYLGRLVEYKRVDLLVDAFRHLPSARLIVAGDGPEMNRLRRSAPLNVEFAGKVTEDEKWDLLRRAKALLFPAHEDFGIVIGEARAVGTPVIGLAQGGVLDYAGDPGVLPWIKRQNLDDVKMAVDRFERESFNSDVYEKYLIQTEDSFRNAVARLVDDLVANKKGESRVGRAADARDH

SEQ ID NO: 310 - DNA, 1137 bp, Alicyclobacillus acidocaldarius
gtgaaggtggcattggtccacgactggctagttgatttcgcgggatcagaacgagttttgtttgaacttgcgaagttgttcccagatgcgccaatctatacgtctgtctatagcgaacgtgctctcgccaatgtgtttccgaaggaacgtgtgcgcacaagttttttgcagaagataccgttgtcagtcaagcgctatcggtcattgttgccgttcctaccatttgccttcgaaatgttcgatttgacggggtatgatgtcatcatctcgagttcacacgcatgtgccaaaggcgtcgttgctggatcgaatagtattcatatctgttattgtcatacgccgatgcgatacgcgtggagtcactatcatcagtacctgagaggcgttcgcggaacgctcaaacgggctaccgtcggagccatcctttcatggttgagaacatgggattttatagctgctcaaagagttgatttcttcattgcgaattcttctgaagtccagaaacgaatccggcattactatcgtagagacgccgttgtgatccatccgcctatttcagctcctgaaggcgaaaacggcgatccagagagagcagatttctatttgtatctgggtcgtttagtcgagtataagcgggtggacttgcttgtggacgcttttcgccacctgccgtctgcaagattgattgtggcaggagatggaccagagatgaatcgccttcgccgttcagctccgctcaacgtagagttcgcagggaaggtcacagaagatgaaaaatgggatctgttgaggcgggcgaaggctttgttgtttccagcacacgaggattttggtatcgtgattggggaagccagagcagttgggacgcccgtgatcggacttgcacaagggggcgttttggactacgcaggcgatcctggtgtgctcccctggattaaaaggcaaaacctagacgatgttaaaatggccgtcgaccgatttgaaagggaatccttcaattcggatgtctacgagaagtacctcattcaaaccgaggatagttttcgaaacgccgtcgccaggcttgttgacgatttggtggcgaacaagaaaggtgagtcgcgtgttgggcgtgcagcggatgcgcgagatcattga

SEQ ID NO: 311 - protein, 362 aa, Thermoanaerobacter sp. X514
MKIAIIHDWLTNMGGAERVILAFHEIFPDAPIYTSVYNPDKLPEEFRKMDIRTSFIQKLPKAKTKYNIYLPLMPVAFEQFDLSEYDVVLSSSSSCAKGVITRADTLHICYCHTPMRYAWDFYHEYKQNAPKWQRKFIPFLMNYIRMWDRLSADRVDYFIANSSAVARRIKKHYRRDAVVINPPVDTNFYTPKDEDEDYFLIVSRLVEYKRIDIAIEAFNDLGLPLIIIGDGPERSKLQKMAKSNIRFLGRLPDEEVKEYYAKCRAFIFPGEEDFGITPLEAQASGRPVIAFGKGGVLDSVIDGLTGIFFKDQNKESLKEAIKRFEKIDFSKETIRKHAEKFDVKIFKKKIYDFIINKYNDYR

SEQ ID NO: 312 - protein, 374 aa, Caldicellulosiruptor saccharolyticus DSM 8903
MKVAIVHEWLTTMGGSEKVILELKKLFPEAPIYTLVYNRRKLGKYFDKYLIITSNLQKNPLAHIKHQLFFKYMPRAFENFDLSDFDLVISSSSAFAKGVITSPNSVHICYCHTPPRYLWDLTHEYLKDYNLIIRRYLERNFHYLRIWDTIAANRVDYFVANSNYVANRIKKFYKRDCKVIYPPVDTEYFTPAKDKNIEDYYLIVSRLVPYKRVDLAVEAFNQLSKRLVIVGDGPEYKKLKSIAKSNIEFLGYQPDKTVRDLYQRCKALIFPGVEDFGIVPVEVQACGRPVIALKKGGAVETVEEGKTGVFFEKQDVESLKEAVYKFEQDIERFDKDYIRSHAEKFSAERFRMEFKDFILKVTEYERGEGMGGKV

SEQ ID NO: 313 - protein, 357 aa, Mesorhizobium sp. BNC1
VRVAIVHYWLVSMRGGEKVVEAFCDMYPDADIFTLVYDERKVSEKIRRHKVTTSFLQKIPGAVKHYQSLLPLMPFALESFDLSGYDLILSSESGPAKGIVPGPQAVHICYCHSPMRYLWDHYHFYRANSGMLARALLTMMAPPLRAWDVSTSARVDHFVANSRHVADRIEKYYRRSATVLSPPVSVHEFAPTAATKDFFLLAGQLVGYKRADLAVEAFTKMGENLVVIGEGSEMDKLRRIAGPTVSFLGRAPFPLLKEMLARCRALVFPGEEDFGIVPVEAMASGRPVIAYGRGGALDSVSPGRTGILFHEQTVPSLIEAVRRFQSMERTFRPDVIRDHAAQFSEANFKARMQQIID

SEQ ID NO: 314 - protein, 363 aa, Dictyoglomus turgidum DSM 6724
MRVAVVHDWIVNIGGAEKVLKAILELFPDADVYTLVYLKDTLRKLGINNKVYSSFISGLPFAKTKYSYYLPLMPLAIEQFDLSKYDLVISSSHCVAKGVLTKSYQIHICYCHTPMRYIWDLYFPYLKEHKLENGIKGIFVKPILHYLRIWDVSSANRVDYFVANSQNVANRIRKIYRRDSVVIYPPVDVERFLPSYKKEDYFMVLSRLVPYKKVDLVVETFNELNLPLVVIGDGEEMGKIKKMAKENIKILGWQEDDVVKEYLAKAQALIFASEEDFGIVSVEAQACGTPVIAYNRGGAKETVIDGETGILFEEQNVESLKKAVLRFLKERDNFQRDKIMENAKRFSEDRFKREFKSYIEGII

SEQ ID NO: 315 - protein, 336 aa, Desulfotomaculum reducens MI-1
MKTAFIHDWLVTYAGAERVLEQMLKIFPDADLYSVVDFIPYNQRSFLQEKLSQTSFIQKLPFAKKKYRSYLPLMPLAVEQLDLSAYDLIISNSHAVAKGVITGPDQLHLSYVNSPMRYAWDLQHQYLQEAKLNRGLKGWTAKVLLHYLRMWDIRTANGVDSFTANSCFISRRIWKVYHREAKVIYPPVAVDEFDVGEYKEDFYLTISRMVPYKKMDLIVEAFSQRPDKNLIVIGDGPDFNKVKAKAKSNVTLLGYQPFDQLKDYMQRAKAFVFAAEEDFGITPVEAQACGTPVIAFGRGGALETIRGLDNPSPTGVFFRQQTVESLLSAVDLFERE

SEQ ID NO: 316 - protein, 378 aa, Artificial
  Substituion in SEQ ID NO 309
MKVALVHDWLVDFAGSERVLFELAKLFPDAPIYTSVYSERALANVFPKERVRTSFLQKIPLSVKRYRSLLPFLPFAFEMFDLTGYDVIISSSHACAKGVVAGSNSIHICYCHTPMRYAWSHYHQYLRGVRGTLKRATVGAILSWLRTWDFIAAQRVDFFIANSSEVQKRIRHYYRRDAVVIHPPISAPEGENGDPERADFYLYLGRLVEYKRVDLLVDAFRHLPSARLIVAGDGPEMNRLRRSAPLNVEFAGKVTEDEKWDLLRRAKALLFPAHEDFGIVIGEARAVGTPVIGLAQGGVLDYAGDPGVLPWIKRQNLEDVKMAVDRFERESFNSDVYEKYLIQTEDSFRNAVARLVDDLVANKKGESRVGRAADARDH

SEQ ID NO: 317 - protein, 378 aa, Artificial
  Substituion in SEQ ID NO 309
MKVALVHDWLVDFAGSERVLFELAKLFPDAPIYTSVYSERALANVFPKERVRTSFLQKIPLSVKRYRSLLPFLPFAFEMFDLTGYDVIISSSHACAKGVVAGSNSIHICYCHTPMRYAWSHYHQYLRGVRGTLKRATVGAILSWLRTWDFIAAQRVDFFIANSSEVQKRIRHYYRRDAVVIHPPISAPEGENGDPERADFYLYLGRLVEYKRVDLLVDAFRHLPSARLIVAGDGPEMNRLRRSAPLNVEFAGKVTEDEKWDLLRRAKALLFPAHEDFGIVIGEARAVGTPVIGLAQGGVLDYAGDPGVLPWIKRQNLDDVKMAVDRFERESFNSDIYEKYLIQTEDSFRNAVARLVDDLVANKKGESRVGRAADARDH

SEQ ID NO: 318 - protein, 378 aa, Artificial
  Substituion in SEQ ID NO 309
MKVALVHDWLVDFAGSERVLFELAKLFPDAPIYTSVYSERALANVFPKERVRTSFLQKIPLSVKRYRSLLPFLPFAFEMFDLTGYDVIISSSHACAKGVVAGSNSIHICYCHTPMRYAWSHYHQYLRGVRGTLKRATVGAILSWLRTWDFIAAQRVDFFIANSSEVNKRIRHYYRRDAVVIHPPISAPEGENGDPERADFYLYLGRLVEYKRVDLLVDAFRHLPSARLIVAGDGPEMNRLRRSAPLNVEFAGKVTEDEKWDLLRRAKALLFPAHEDFGIVIGEARAVGTPVIGLAQGGVLDYAGDPGVLPWIKRQNLDDVKMAVDRFERESFNSDVYEKYLIQTEDSFRNAVARLVDDLVANKKGESRVGRAADARDH

SEQ ID NO: 319 - protein, 378 aa, Artificial
  Substituion in SEQ ID NO 309
MKVALVHDWLVDFAGSERVLFELAKLFPDAPIYTSVYSERALANVFPKERVRTSFLQKIPLSVKRYRSLLPFLPFAFEMFDLTGYDVIISSSHACAKGVVAGSNSIHICYCHTPMRYAWSHYHQYLRGIRGTLKRATVGAILSWLRTWDFIAAQRVDFFIANSSEVQKRIRHYYRRDAVVIHPPISAPEGENGDPERADFYLYLGRLVEYKRVDLLVDAFRHLPSARLIVAGDGPEMNRLRRSAPLNVEFAGKVTEDEKWDLLRRAKALLFPAHEDFGIVIGEARAVGTPVIGLAQGGVLDYAGDPGVLPWIKRQNLDDVKMAVDRFERESFNSDVYEKYLIQTEDSFRNAVARLVDDLVANKKGESRVGRAADARDH

SEQ ID NO: 320 - protein, 378 aa, Artificial
  Substituion in SEQ ID NO 309
MKVALVHDWLVDFAGSERVLFELAKLFPDAPIYTSVYSERALANVFPKERVRTSFLQKIPLSVKRYRSLLPFLPFAFEMFDLTGYDVIISSSHACAKGVVAGSNSIHICYCHTPMRYAWSHYHQYLRGVRGTLKKATVGAILSWLRTWDFIAAQRVDFFIANSSEVQKRIRHYYRRDAVVIHPPISAPEGENGDPERADFYLYLGRLVEYKRVDLLVDAFRHLPSARLIVAGDGPEMNRLRRSAPLNVEFAGKVTEDEKWDLLRRAKALLFPAHEDFGIVIGEARAVGTPVIGLAQGGVLDYAGDPGVLPWIKRQNLDDVKMAVDRFERESFNSDVYEKYLIQTEDSFRNAVARLVDDLVANKKGESRVGRAADARDH

SEQ ID NO: 321 - DNA, 1137 bp, Artificial
  Substituion in SEQ ID NO 310
gtgaaggtggcattggtccacgactggctagttgatttcgcgggatcagaacgagttttgtttgaacttgcgaagttgttcccagatgcgccaatctatacgtctgtctatagcgaacgtgctctcgccaatgtgtttccgaaggaacgtgtgcgcacaagttttttgcagaagataccgttgtcagtcaagcgctatcggtcattgttgccgttcctaccatttgccttcgaaatgttcgatttgacggggtatgatgtcatcatctcgagttcacacgcatgtgccaaaggcgtcgttgctggatcgaatagtattcatatctgttattgtcatacgccgatgcgatacgcgtggagtcactatcatcagtacctgagaggcgttcgcggaacgctcaaacgggctaccgtcggagccatcctttcatggttgagaacatgggattttatagctgctcaaagagttgatttcttcattgcgaattcttctgaagtccagaaacgaatccggcattactatcgtagagacgccgttgtgatccatccgcctatttcagctcctgaaggcgaaaacggcgatccagagagagcagatttctatttgtatctgggtcgtttagtcgagtataagcgggtggacttgcttgtggacgcttttcgccacctgccgtctgcaagattgattgtggcaggagatggaccagagatgaatcgccttcgccgttcagctccgctcaacgtagagttcgcagggaaggtcacagaagatgaaaaatgggatctgttgaggcgggcgaaggctttgttgtttccagcacacgaggattttggtatcgtgattggggaagccagagcagttgggacgcccgtgatcggacttgcacaagggggcgttttggactacgcaggcgatcctggtgtgctcccctggattaaaaggcaaaacctagaagatgttaaaatggccgtcgaccgatttgaaagggaatccttcaattcggatgtctacgagaagtacctcattcaaaccgaggatagttttcgaaacgccgtcgccaggcttgttgacgatttggtggcgaacaagaaaggtgagtcgcgtgttgggcgtgcagcggatgcgcgagatcattga

SEQ ID NO: 322 - DNA, 1137 bp, Artificial
  Substituion in SEQ ID NO 310
gtgaaggtggcattggtccacgactggctagttgatttcgcgggatcagaacgagttttgtttgaacttgcgaagttgttcccagatgcgccaatctatacgtctgtctatagcgaacgtgctctcgccaatgtgtttccgaaggaacgtgtgcgcacaagttttttgcagaagataccgttgtcagtcaagcgctatcggtcattgttgccgttcctaccatttgccttcgaaatgttcgatttgacggggtatgatgtcatcatctcgagttcacacgcatgtgccaaaggcgtcgttgctggatcgaatagtattcatatctgttattgtcatacgccgatgcgatacgcgtggagtcactatcatcagtacctgagaggcgttcgcggaacgctcaaacgggctaccgtcggagccatcctttcatggttgagaacatgggattttatagctgctcaaagagttgatttcttcattgcgaattcttctgaagtccagaaacgaatccggcattactatcgtagagacgccgttgtgatccatccgcctatttcagctcctgaaggcgaaaacggcgatccagagagagcagatttctatttgtatctgggtcgtttagtcgagtataagcgggtggacttgcttgtggacgcttttcgccacctgccgtctgcaagattgattgtggcaggagatggaccagagatgaatcgccttcgccgttcagctccgctcaacgtagagttcgcagggaaggtcacagaagatgaaaaatgggatctgttgaggcgggcgaaggctttgttgtttccagcacacgaggattttggtatcgtgattggggaagccagagcagttgggacgcccgtgatcggacttgcacaagggggcgttttggactacgcaggcgatcctggtgtgctcccctggattaaaaggcaaaacctagacgatgttaaaatggccgtcgaccgatttgaaagggaatccttcaattcggatatttacgagaagtacctcattcaaaccgaggatagttttcgaaacgccgtcgccaggcttgttgacgatttggtggcgaacaagaaaggtgagtcgcgtgttgggcgtgcagcggatgcgcgagatcattga

SEQ ID NO: 323 - DNA, 1137 bp, Artificial
  Substituion in SEQ ID NO 310
gtgaaggtggcattggtccacgactggctagttgatttcgcgggatcagaacgagttttgtttgaacttgcgaagttgttcccagatgcgccaatctatacgtctgtctatagcgaacgtgctctcgccaatgtgtttccgaaggaacgtgtgcgcacaagttttttgcagaagataccgttgtcagtcaagcgctatcggtcattgttgccgttcctaccatttgccttcgaaatgttcgatttgacggggtatgatgtcatcatctcgagttcacacgcatgtgccaaaggcgtcgttgctggatcgaatagtattcatatctgttattgtcatacgccgatgcgatacgcgtggagtcactatcatcagtacctgagaggcgttcgcggaacgctcaaacgggctaccgtcggagccatcctttcatggttgagaacatgggattttatagctgctcaaagagttgatttcttcattgcgaattcttctgaagtcaataaacgaatccggcattactatcgtagagacgccgttgtgatccatccgcctatttcagctcctgaaggcgaaaacggcgatccagagagagcagatttctatttgtatctgggtcgtttagtcgagtataagcgggtggacttgcttgtggacgcttttcgccacctgccgtctgcaagattgattgtggcaggagatggaccagagatgaatcgccttcgccgttcagctccgctcaacgtagagttcgcagggaaggtcacagaagatgaaaaatgggatctgttgaggcgggcgaaggctttgttgtttccagcacacgaggattttggtatcgtgattggggaagccagagcagttgggacgcccgtgatcggacttgcacaagggggcgttttggactacgcaggcgatcctggtgtgctcccctggattaaaaggcaaaacctagacgatgttaaaatggccgtcgaccgatttgaaagggaatccttcaattcggatgtctacgagaagtacctcattcaaaccgaggatagttttcgaaacgccgtcgccaggcttgttgacgatttggtggcgaacaagaaaggtgagtcgcgtgttgggcgtgcagcggatgcgcgagatcattga

SEQ ID NO: 324 - DNA, 1137 bp, Artificial
  Substituion in SEQ ID NO 310
gtgaaggtggcattggtccacgactggctagttgatttcgcgggatcagaacgagttttgtttgaacttgcgaagttgttcccagatgcgccaatctatacgtctgtctatagcgaacgtgctctcgccaatgtgtttccgaaggaacgtgtgcgcacaagttttttgcagaagataccgttgtcagtcaagcgctatcggtcattgttgccgttcctaccatttgccttcgaaatgttcgatttgacggggtatgatgtcatcatctcgagttcacacgcatgtgccaaaggcgtcgttgctggatcgaatagtattcatatctgttattgtcatacgccgatgcgatacgcgtggagtcactatcatcagtacctgagaggcattcgcggaacgctcaaacgggctaccgtcggagccatcctttcatggttgagaacatgggattttatagctgctcaaagagttgatttcttcattgcgaattcttctgaagtccagaaacgaatccggcattactatcgtagagacgccgttgtgatccatccgcctatttcagctcctgaaggcgaaaacggcgatccagagagagcagatttctatttgtatctgggtcgtttagtcgagtataagcgggtggacttgcttgtggacgcttttcgccacctgccgtctgcaagattgattgtggcaggagatggaccagagatgaatcgccttcgccgttcagctccgctcaacgtagagttcgcagggaaggtcacagaagatgaaaaatgggatctgttgaggcgggcgaaggctttgttgtttccagcacacgaggattttggtatcgtgattggggaagccagagcagttgggacgcccgtgatcggacttgcacaagggggcgttttggactacgcaggcgatcctggtgtgctcccctggattaaaaggcaaaacctagacgatgttaaaatggccgtcgaccgatttgaaagggaatccttcaattcggatgtctacgagaagtacctcattcaaaccgaggatagttttcgaaacgccgtcgccaggcttgttgacgatttggtggcgaacaagaaaggtgagtcgcgtgttgggcgtgcagcggatgcgcgagatcattga

SEQ ID NO: 325 - DNA, 1137 bp, Artificial
  Substituion in SEQ ID NO 310
gtgaaggtggcattggtccacgactggctagttgatttcgcgggatcagaacgagttttgtttgaacttgcgaagttgttcccagatgcgccaatctatacgtctgtctatagcgaacgtgctctcgccaatgtgtttccgaaggaacgtgtgcgcacaagttttttgcagaagataccgttgtcagtcaagcgctatcggtcattgttgccgttcctaccatttgccttcgaaatgttcgatttgacggggtatgatgtcatcatctcgagttcacacgcatgtgccaaaggcgtcgttgctggatcgaatagtattcatatctgttattgtcatacgccgatgcgatacgcgtggagtcactatcatcagtacctgagaggcgttcgcggaacgctcaaaaaagctaccgtcggagccatcctttcatggttgagaacatgggattttatagctgctcaaagagttgatttcttcattgcgaattcttctgaagtccagaaacgaatccggcattactatcgtagagacgccgttgtgatccatccgcctatttcagctcctgaaggcgaaaacggcgatccagagagagcagatttctatttgtatctgggtcgtttagtcgagtataagcgggtggacttgcttgtggacgcttttcgccacctgccgtctgcaagattgattgtggcaggagatggaccagagatgaatcgccttcgccgttcagctccgctcaacgtagagttcgcagggaaggtcacagaagatgaaaaatgggatctgttgaggcgggcgaaggctttgttgtttccagcacacgaggattttggtatcgtgattggggaagccagagcagttgggacgcccgtgatcggacttgcacaagggggcgttttggactacgcaggcgatcctggtgtgctcccctggattaaaaggcaaaacctagacgatgttaaaatggccgtcgaccgatttgaaagggaatccttcaattcggatgtctacgagaagtacctcattcaaaccgaggatagttttcgaaacgccgtcgccaggcttgttgacgatttggtggcgaacaagaaaggtgagtcgcgtgttgggcgtgcagcggatgcgcgagatcattga

What is claimed is:

1. An isolated or purified nucleic acid sequence comprising a nucleic acid sequence encoding a polypeptide selected from the group consisting of a polypeptides having at least 90% sequence identity to SEQ ID Nos. 1, 18, 35, 52, 69, 86, 103, 120, 137, 154, 171, 188, 205, 222, 239, 256, 273, 290, and 309.

2. The isolated or purified nucleic acid sequence of claim 1, wherein the polypeptide has enzyme activity at or below about pH 8.

3. The isolated or purified nucleic acid sequence of claim 1, wherein the polypeptide has enzyme activity at a temperature at or above about 35 degrees Celsius.

4. The isolated or purified nucleic acid sequence of claim 1, wherein the nucleic acid sequence is present in a vector.

5. An isolated or purified polypeptide comprising a polypeptide selected from the group consisting of polypeptide having at least 90% sequence identity to SEQ ID No. 1, 18, 35, 52, 69, 86, 103, 120, 137, 154, 171, 188, 205, 222, 239, 256, 273, 290, and 309.

6. The isolated or purified polypeptide of claim 5, wherein the polypeptide has enzyme activity at or below about pH 8.

7. The isolated or purified polypeptide of claim 5, wherein the polypeptide has enzyme activity at a temperature at or above about 35 degrees Celsius.

8. The isolated or purified polypeptide of claim 5, wherein the polypeptide is glycosylated, pegylated, or otherwise post-translationally modified.

9. The isolated or purified polypeptide of claim 5, wherein the polypeptide has an activity selected from the group consisting of UDP beta-glucosephosphotransferase, Dolichol-phosphate mannosyltransferase, and Glycosyltransferase activity.

10. A method of glycosylating or post-translationally modifying a first polypeptide at temperatures at or above about 35 Celsius or at a pH at or below about 8, the method comprising:
providing a recombinant, purified, or isolated polypeptide encoded for by a nucleotide sequence comprising a nucleotide sequence selected from the group consisting of a nucleotide sequences having at least 90% sequence identity to at least one of the sequences of SEQ ID NOs: 2, 19, 36, 53, 70, 87, 104, 121, 138, 155, 172, 189, 206, 223, 240, 257, 274, 291, and 310;
glycosylating or post-translationally modifying the first polypeptide with the recombinant, purified, or isolated polypeptide.

11. The method according to claim 10, wherein glycosylating or post-translationally modifying the first polypeptide occurs at or below about pH 8.

12. The method according to claim 10, wherein glycosylating or post-translationally modifying the first polypeptide occurs at a temperature at or above about 35 degrees Celsius.

13. The method according to claim 10, wherein the recombinant, purified, or isolated polypeptide is glycosylated, pegylated, or otherwise post-translationally modified.

14. The method according to claim 10, wherein the recombinant, purified, or isolated polypeptide has an activity selected from the group consisting of UDP beta-glucosephosphotransferase, Dolichol-phosphate mannosyltransferase, and Glycosyltransferase activity.

15. A method of modulating the protein stability, solubility, degradation, activity profile, or externalization of a first polypeptide, the methods comprising:
providing a recombinant, purified, or isolated polypeptide encoded for by a nucleotide sequence comprising a nucleotide sequence selected from the group consisting of a nucleotide sequences having at least 90% sequence identity to at least one of the sequences of SEQ ID NOs: 2, 19, 36, 53, 70, 87, 104, 121, 138, 155, 172, 189, 206, 223, 240, 257, 274, 291, and 310;
glycosylating or post-translationally modifying the first polypeptide with the recombinant, purified, or isolated polypeptide.

16. The method according to claim 15, wherein glycosylating or post-translationally modifying the first polypeptide occurs at or below about pH 8.

17. The method according to claim 15, wherein glycosylating or post-translationally modifying the first polypeptide occurs at a temperature at or above about 35 degrees Celsius.

18. The method according to claim 15, wherein the recombinant, purified, or isolated polypeptide is glycosylated, pegylated, or otherwise post-translationally modified.

19. The method according to claim 15, wherein the recombinant, purified, or isolated polypeptide has an activity selected from the group consisting of UDP beta-glucosephosphotransferase, Dolichol-phosphate mannosyltransferase, and Glycosyltransferase activity.
